United States Patent Application Publication US 2007/0105122 A1 - sequence listing, part 9

SEQ ID NO: 18123 - DNA, 6193 bp, Homo sapiens
tgtccatgtatactattgattagctcccacttgcaaatgagaacacgtggtatttgattttcttttctgggttagttcacttaggatgatggtctccagctccatgttgctgcaaaggacatgatttcgttctttttttatggctgcctcttttgtttcttaaatctgaattttcatgtggcttcaatgctagtctggcctaccctttccttcccaaagtcaccaccaactcactcccacccccacctcatgcagtgcacccctcacagcccccacccttggcagtgacatttggatttccagggcctttcctgatcctttagagacatcctctcccggccaagtcctgcaagggagacttgagtcagaggttcgatgggctggggtgaggtgggccacacaattaccacacccactcccaggcctattcccggtgatctaagcacacagaagcaggctggtacttagggaagaaggcaccagtgtatgccagagcttaggatggcgtgaggaccaaatggaaagatagatattgtaagtggttgttgggagaaggaaggctggaggtgggggtactttgtgggctgcttccaggagctcccacccacaggcacaagtcttcctagctggcagaagaagccaggaacaaggctgaattctgacagaacccgcctggagctccatttcagttgcagagacctttatcttatgcagctgtcttttgcccagcctcctctgcagatgccataggacctcctctttcttttcttttctttctttttttttgagactgagtcttgctctatgaccagactggaatgcagtggcacaatctcagctcactgcaacctccgcctcccgggttcaggcgattctcctccctcagcctcccaaatagctgggattataggcatgcgccaccatgcccagctaatttttgtatttttagtagagacagggtttcactgtgttggccaggatggtctccatctcttgacctcgtgattcacctgcctcggcctcccaaagtgctgggattacaggcatgacccaccgtgccctgccaggacttcctctttctttttttttttttctttttttttttgagacggagtttcactcttgttgcccaggctgaagtgcaatggcacgatctcggctcaccgcaacctccgcctcccaggttcaagcgattctcctgcctcagcacccccgagaagctgggattacaggcacgcaccaccacgcccggctaattttgtatttttagtagagatgaggtttcttcatgttagtcaggctggtctcgaactcccgacctcaggtgatccgcccacctcggcctcccaaagtgctgggattacaggcatgagccaccgcgccctgccaggacctcctctttctgatataacacctgcatttgtttggcagacatctgtgtagttctgttcacaggagaaaaaagtcagattactaaacaccagtgtttaacagtggccatcagtaggtggtagcttcagagagtatttgctttcttatcgactatggtttcatgtattctctgttttgttttttactataagcatattttgtttttatataagggagaaataaagctcttctcaattgggagaaattactgcctgcctataatgaatgaggccctgctgggcactggctgggggcttgatgagtaggatatggtccctgtttctggagggtcctcaaactaaagaggaaagaagataggggaacaaaacagtgcggttggtgttctaagtatcctctgatcacagaagagaaagctgcccctacccagggacatgatcctgagccacctggattgtgagggagaatcaggcattgatgaggaggggaatgaggaagtagtctgcctacaggggacatagctcggcacagctccacagagctaggggctgcaacttggggcatgagaagagagagcagcaagagaaccatttgagaaggctgtcctttctctgtcatcactcctgatgccctggtgagctccacggtgcaggaacctccatgtgtgtgctgcatccccaagttctggtggcagcaggtgcttagcagcccttgtccagtctcgcctgtgacactgctgctcccttcccctgtcctgacctcctggttggctgtcctgccagagccttgcctggaagatgaaattccagctaccctgtgggagcagtaacgccttcttccttcttctcaatctccagaaatgtctttcctccaggacccaagtttcttcaccatggggatgtggtccattggtgcaggagccctgggggctgctgccttggcattgctgcttgccaacacagacgtgtttctgtccaagccccagaaagcggccctggagtacctggaggatatagacctgaaaacactggagaagggtaagtggtgacccttcaggtctcagtacttttccaaggagctgggatacaggcttactgctttctttctaaactctctcctttttttaattgaaaagataatataacaacattaggaaaaatttaataacaatttttaaactaggaataattctgttaccctaacacagtaattttgattttggcatattcctttccatgtgtacatattacgtagttgtgcttggcttaggtgctgttttacattttagcttttcttatcaaaagcatttctcattctctgttgttgtctctgtaattataatgataaattgctccataatatttagtgataattacaatcttttactaaaccagtgcttccagagtgtattctgaggaattccaggcttgtgggatcgtcaaactaaaaggagttcctgagtgaacaagtatgggagacaccttttatccaattccatgctcctgatgctcagcacagacatatgcttattagaatgaggtgtctggattgctgctgattcaggcatggccagcccctccctgtgaagaagctgtggtgtctgaggaatcacttcaaggtcacccgttagagcagacctgcctatctccctcttctgggggactgctagaatccattgtggacagcttagagccacacacccaaatgtgttagctctgcctccttgctgtgtgctctcagtgttagagctgtagcttggtgggatttcagtcatgccagtggtgtggcaagagagttggagtggtgaaggtctcattgatggcgtggtcaccatgttagccccccaggtggaagtcatcgtcatctgtttagtaagtaaggaagcttgcgaaaggaaggcaggagattgtgcaggtttatagtaagtcaccttagtaagatactaggagagagagagacctgttaagctttgttcaacccagggtttcccaatcttatttgattacagactcttctccccaccctctcacccacctgaccccattttttttttttttccacataacatctacgggaacatggatccctctgggaaatactaaaataattaagggctcatatttattgagccctcaccaactctatattaccagacattgtggtgagcacttttatattcatctttcaatatgccctgtggcccaaagtggagctactagatatttgcattttacaaatgaggaagctgaggttcaaagagcaaaaataacttgcccagagttacacagctagattcagattcagttggaccttagagctgggcttgttgaactacagtactgtactaccccaaagcattttattcctaggcatcttctatcctctccttcgttaataatattgcaggtaacatatttaggttaaaaatttgagactttttcagtttgggccatgtttctgttctgaaggattattatacaatatctgatgacatcagcaatagacaaaatggccatttttccagaaatgtcccacttctgaatgttcaggttagaaaaaagattttcatggtgggagggacctaccgggtatataacaggattcttaagcttggttaactttcttcaggaaggtgtgtattctgtctgtctgtgtttcctgtgtgtcttttcccacgtgtgaaatgcctgtccaggtcctctactaggccgggtctctgaccttggctggacttagtgtggttcatgagctgcttagtgattggggctgggctgggaggagatatcgaatttctttttttcctctcttagaaccaaggactttcaaagcaaaggagctatgggaaaaaaatgaagctgtgattatggccgtgcggaggccaggctgtttcctctgtcgagaggtgagtgcagatgaggatctattcagagaaaaggatcctggcaagtaggggccattgttttccagccagaaccaagggtcggtaagccagctttagccttttacccacatgttctgttctgttatttgctctaggtatttcttttgatttgtgctcttttttttttttttttttttaaacaactcaccctctcctactggggttagcaacacatctcagtttcccttagtactcccaggcctttcaccctgtgctgtaccttctgagtcctggaccatattccaatttaatcaggggcggtgaccaggtccaattccatgcttctgatgctcagcacagatatatgatgtgcctggattgcttctgattcgggtgtggtcagtccctccctgtgatgaagctgcagtgtcggaggaaacacttcaaggttacctattagagcagacctgcctgtctctctttccttggggagctcttagagtccatcgtggacagctgagagccacattctcacatgttagctctgcctccttgctgtgtgctctcagcattgaatctgtagctcagtgggatttcagtcatgccagtagtgcatttggcatgagagtttgttgaaagttggagctcactgactgggtggtctccaggttggcccctcgaagggaagacatcatctatttgtaggtgatggagcttatcagtggaaggaaggaactgtgattgttgaaacacaaaatgctagtgtgagaaggaacattgccactacttggatctagccttgtccctttataggtaggcaaactgaggaccagagtggttagtggtctgtttgtggtcacacagccagtcagtggcagaagacccagattctgaaattactgccctgcctgggagaaaactgggaatgacagtattcctgctcttgagacaactttgcatctcaagcagtggctgtggccctgtccaaattgtcatcctcattctcctggttcccctccctgaccctgagacaccacctttcagccttgctgatctctccatgcttgtgtggctgggctggtgaagaatccacttgcactgctggatgcatgtgatgcctgcagtaccctacccccagggcactgtgtgcctgctatctcagtgggtcctcaccatagcccttggaaatacagcttgttttactctcattttattattctcattacagaggaggaaacagttacagaggttgtaacaaagccacccggatcggggagatgtattaattttctgttgctgtaacaaattacctcaaactcaatggctttaaccagcacagatttatcttgtagttctagaggtcagaattccaaagcggaatctggttgcattccttctgaagactataggggagaatccatttcttttgccttttccagctgttagaggccacctatgtatattggtttatggccccttcctctatttttaggtcagcaatggctggcaagtcagcaacagcatggaagcctgttttgacttgatttctcggggccattaaaatccagaaggttccaagagcaacagctctccctaattataacctgtttccctctgtactggtctgtgcccacatagaacatttagtggaaacttacgtttccaaaaagatgggtggatggcaatctgagttattttgagtggcccaactaggaggtatgtgactcagtttccacgtcatggctttgtatagtgccacaccaggagtaaagagccaggaaaagtgagtaagacctttcatctcagccaggtgcagtggctcatgcctataatcccagcactttgggaggctgaggtgagaagatcacttgagcccaggaatttgagaccaccctaggcaacatagcgagaccctgtctctac

SEQ ID NO: 18124 - DNA, 3877 bp, Homo sapiens
caaaaaattgggtgggcatgatggcactggcctgtagtctgagctcgggaggatcacttgagcccggggggttgaggctacagtgagccgtgattgcaccattgcactccagcccgggcaacagagcaagaccctgtctcaaaaaacaagaaaaatttggttctttttctttttttttgagacataatctcactctgttgcctaggctggagtgtaatggcacgatctcggctcactgcaacctccacctcctgggtttaagtgattctcctgcctcagcctcctgagtagctgggattacaggtacatgccaccatgcccagctaatttttgtatttttagtagagatggggtttcaccatgttggtcaggctggtctcgaactcctgacctcgtgatccgcccacctcggcctctcaaagtgctgggattacaggcatgagccactgtgcctggcctgtgtactatgttctcataataaagtaagctggagaaaagaagatgttacaaagaaaatcatgagaaaaaacacatttactgttcattaagtggaagtggatcatcataaaggtcttcatcttcgtcatcttcacattgagcaggctaaggaagagaaagcattggtcttggtgtctcaggtggcagaggcaggagaaaaatccatgtataattggaaccgagacattcaaaccatgttattcaagggtcaactgtatacatatgtaatctgtgtttttcacacagcattgggccattgaccattttcttgttattagatgtatatatcagttatttccagatggctcttttttaaaaatgggtagctaaacaataaatgaaattaaactgaacagggttccagtagaagtttgtgtttctaaatgtccattgtatgagcatgtgaagcaaaatccaaaacccttttgtaattataatgcagagatgattccaattttgattgaaaatgatcctcagccttgggcgagattgttgttcatcctttgaacccactgttagtttatgccagagctagctatgggctgggctgcagcagcgttatcatggaaagccatgtgtagacttctgtaaagtcagcactgaagggaatattgaagagatcattgagtcgtcctcttcattttacatgaggggaaactatgcccatggtcacagaaattactaatagagtaggaactagaatccatttacaccttactatcaaaactgataccatgtgctctcgctaggaatataatacaataaggcatcatgaacaacttcggacttctataaacttcatccagtggacgaacagaatcccacagagtgatgaatggcaatgtgaggtgatagtgtgagctgagtgctgtaggcagatacagctgagagaatttaggggtggggtagggctcagcctcaatggcttggagtcaggtaaagccgagggaaagagatggggcttgggcaaataagagtagaaagccaagaattccagacttgcagggctggagaaagaggcatagaggcaggtggtgttagtcatggcctgttcaggtaacagtggaatgtttaaccaaggagaagagttcaagttcaggctaggtccagtggctcatgcctgtaatccgagcacttggggaggccaaagtagaggatcacttgaggccaggagttcaaaaccagcctaggcaacatggcaagacctcgtctctacaaaaaattttaaaaattagctggccgtgatggcgcacacctgtagtcccagctactcgggaggcagaggtggggggattgcatgagccaggaaggtcgaggctgcagggagccaaggttatgccactgcactccagtgtggatgacaaagcaagaccccatctcaaagaaaaaaagttcagtgattatactgcatggtaagtgcattaacagagggcataaacattcagtggttcagaggaaggaaagtttcagtaactaacaatgtgggaaagaaggggagaatttggtaattaacagagtagggaagaaaaagattttgagtttagctgaaaatttggtggtaaccttactgatggagacagagaagtctgaaggggaatgtgactttcgggaaaagccagtgcattccctttatcccatacaaggtgaggggacagtctgacatctgggtagaaatatccaggaggtggttggtgctatcagttatctaattggacgtcacccaacgtcttgacttttaaaagctatggttgtttggtacagtctgaccaggattagcagttatagtcaaactaaaaatattaattggtgaaagatgagccaaaggttggctttggtgttttctctcgagagggctgagtaattgcttacctgaggcctagggctagccagaaccttatggtgacactgcagttggaaggtggcccacactggcagcagagtcgagcttgtctacatcaggaaagggtgaaagaaccattaaattccccttccagaagggacagggtttagatgcagatagaggatgccacacagtaggtgaccctgttccatcgaaggaaaacatgtaacccatgctcttgtccatagttcaatcctagtgcttggtggagatggagaggcttgggttctcattttggctccagcacagccttgtcaactttggaccagtcttgtccttctttgtgcctcagtgtcctcgttttcctctctggttagaaggaactgcctggaccctggaaaggaaagtgctagaagttctcagctatgaaccacctgtggcacctgaaacagaattttgaacgacactttgctaggtagattataattgtgtggcttctcccataggtgacattaattaccaagaatttgctaaaagactctggggtgacatctacttcaaccctaagacgtaagtagagtacgggacgtgactttccagaggggtgatcatttacccagtaagtgaggacagtgaaattctctgagttcaaagattaaatacctactttttttttttttttaatgtaaactaccgtctttcctcccctaaatgggttggcttcctaagctctgatctggtgagaagctgtttctcctgaagtctttacagcccagctcaggcatccaggagggtcataaccatgtatccttccaggaatctgtctctggaaactttacagtcacacacacattcctcccctgggctgttgttcagattcagcacttagacaatgcctcttgggatcagtgatagtgccttttcccctgggtcactcagaacttatttttccttttaggcgaaagttcaccaaaaaggccccaactagcagctcccagagaagtttcgtggagtttatcttggagcctctttataagatcctcgcccaggtgagtgtgtcaggtcacactgggcagatctgctcttataagcacagtgtggaagagctggtgaactcacacttccctctgtccctaaacctgctcagttttatgtcaagtataagggtggttgttggtcactaattgttccagaagtaatcttctggatccagaacactacattactctaagtgttattaaaatcaaaggaaaggggcccgggcatggtggctcatgcctgtaatcctagcactttgggaggccgaggtgggcagattgcctgagctcaggagcttgagaccagcctaggcaacacgatgaaaccccgtctccaccaaaatacaaaaaattagctgggcatggtggcgggcgcctgtagtcccagctactcgggaggctaaggcaagagaattgcttgaactcaggaggcagaggttgcagtgagccgagattgcaccactgcactccagcctgggcgacaaagcgagactctgtcacc

SEQ ID NO: 18125 - DNA, 4491 bp, Homo sapiens
  CDS (83)..(1126)
tctgctaaagaagtgggcaggtatttttagaaacatacttgattctgacaactacagtcctataccagtaacaagtgaagagatgtacaaaaaggtggtaggacaattcccatttcaagatatagaactggaaaagcaaccatttccaaaaaagtttcctttctctgaatttgtgccaaaagtttacaaccaaattaaagaatttatctacgcttgtctgaagttttcagaagatcttcatctaagctcaactgaagttgatgacatgattcggaaatcaacaaacctgttgctaaccaggactctgagcaactctctgcagaatgtaattaaaaggaagaatattgggcttactgagcttgttcagattattatcaatacaacacatttggagaaatcctgtaagtacttggaagaatttatcaccaacatcacaaatgtgcttccagagacagttcacactaccaagctctatggcaccacaacttttaaggatgctagacatgcagctgaagaagagatttatactaacttaaaccagaagattgaccagttcctacagctggcagactatgactggatgaccggagatttgggcaacaaagctagtgattacctggtagacctcattgcctttcttcgtagcacctttgctgtattcacacaccttcctggaaaggtggcccagacagcgtgtatgtcagcttgcaagcatttagccacatccttgatgcaacttttgttggaagctgaagtgcggcagctcaccttgggagcattacagcagttcaacttggacgtcagagaatgtgaacagtttgccagatccggcccggtgcctgggttccaggaggacacgctgcagttggccttcatcgacttgagacaacttttggatcttttcatccagtgggattggtcaacctaccttgctgactatggtcagcccaactgcaagtacctccgggtaaacccggtgactgctctgaccctgcttgagaagatgaaggatactagccgcaagaacaacatgtttgcacagtttcggaaaaatgagcgagacaagcagaaactcattgacaccgtggccaagcagctccgaggactcatcagcagccaccattcatgaagggtgaccccggacccacagaggcgacctgctgcagcctctgtgtcagtctggggtccagccccagctgaccctgcatttgtgcattcttcttcaaagagagcatatgtatttttttattaacccctgtgcagtattcacataacatttccctatagtaaaagaggcacaagaataagcaagtacatgagatgttgctaggctgggactcaggggaagttattactacactatctgtgttatcttagagatggtggtatcatcaattccacagtgatgaaccacctttcatccatggctctaaagcttaggtctggggcttaggaaccataaaaagtgggtatctggcgctgggaggtagagtgagtaagcaaaaggatactaaaatatgtcctgttcactcttggatgcccattcaccacatagatgaggctgattcttctcaatacaaggaaagggcatggcaaacattactatttagtacactaagggcagctctggagggtcatctcctcagtctgctgactttcactggcttgtgaacaagcatggcatatggcaagatgacagcttcattccaatcccccaagaatggcggtttctttagcctgatctaaccccaggcttttattgcaattttttctagggcaggatacagctaagtagacagcagtaataattggatcccatgtttaactgcatattgccccagctctaggagtgttgagtctcaactcgaagagtttttctggatcttgaaagccagttttcatggaatcagagacccaatcccttccctgttcatctcatttccttcacttacagtcagagcgcttggttcaggacataaatcaacagttacttccataggccttcacagggcgtttcagacttagcctcctccagtaatgccattgaaatagttcagatttcggaagcctaaaaatggcctttaccttacccttaggtgtaacctgaggattagttgggattgttcctttatgttttaaaaccagctttttggttatcatctttaaggaaatgtcaccagctctgcactgtgggggcagccatgcctggactggatgcctctagggatggagacattgttaccataaagtcgacagagccaaccatggcttgtggcttgttgcctctggcccaactgtccttcactaaataatatcctagatattattttgttgctcaagcccaaggttcccaccctcttttgagatccccaaagccatctttggccttgtctaagaaagattgcctataatcctgtcctccaaactctaaagcctggagcagcttagcgtggaggctgcactcattgacccagatggactcctgagacttaacgcaagggctttgctatgaggtcagtcgggggaaactgtactttaagacacttcagaaagatgctactggctagtagcagaaagatggctagtggcaagagtataattgtgcatcaccaaacaatgacaaataagccacacaggcatttccagcttggattgatgggaggagagactcatcaaacagaattcttcactacctttgtcagctactgagttgcttctggggagggaagtacttccttgcccctccccaacccccctacctcaccatatcctatcatatcttgatagtcatggggaagaggatgtgcacacagacatacaaatttcctcaaagctggagagaccaggctacatgtgagctcatagatgctgctgaggctcatcctgagggctggatggttggccagggtttcagaatgagggtaagggatgagcactgccacccagaacttgataagccaagagaaggcaggagccaaaatggcatcgccaagctctcatctttgttgaaacaagtgagaaacgattatattaatctgaagttctattgcttgagaagagttcaaaacacttctctttgctagtacccagtttgcagcaagatctcttcagctttaagtgctgagagactttgaagtggaaatggagagatgtgtaagcatggcacagtgtttgtctttttagaggatcatcattgctggtctggtctcaaacctctgccttggaagaactgtgctatacaggaaaaagtgaacaaggtggaggaataggggttattctacacagaagtcccatgaaaggaaaagcttattcaagctcaagacataaagatggaccctttgatatatcttctctccattcttagtctgccttcaccttatctaacaaaaaacaacatgcagctactgagttgtatgtagagacatactcttggtgggccagggaaggtaaaaacagggaccagcaatgtcaagtttttgaactagaaaagtgggatgtttttagttttgtctataacctgtagctgggccaacccttgagaggacttgtgcaaagcatgtgtgcccagacccatcagactcctcagatatggcctcaaatacctagagatgtagaagtaccgtggagggcctcaataagagggcaagcacacagatggctagaagcctgtatggcttctggtcaggatgaacccttggccaagttcttgaggaaaccaggtctatattcctgaagggacagttcagtttgggactctattaggtttcagtagtaatataggctgcttgcatcattttaacattcatagggaaaatctctttgagcaggctataaatgaagctgttgcaggtagggaagaacaggacctgaaaatgggaaccaggaagtgagatcctgttggcaaagggaatgtagagcttccagggtgcattgcccactgttctcattgcataccagtcctccaagtcagtctagccttactgtacacttgacaagtgcttactcagcaagtcccagacccacggccttttatctcccaagactggctttggccatgaccttcctcatcaggcctctgagcacactctctaggaactgctgcagaaattcccctaccttagcctcccttctcccaggactcctctcttgactgcaattgcctcttcttcttcttcttcttcttcctttttgtttttttttttttgcctgcattcacaattacttttcacaaaggtgttggaaatggcatttttattttacacagatagttgcacatatatagagaaaattaggaaagtccatttttaactctaaagggaacttttttctctaaaacttacttgtaaagctactgatacagatgggccgcatggttaggggaaagctcctctgtgaaaagagcatgtttattcctcttgtaccttttcctcttttaactgctattaaacaagaaagcctacatacctgtttcaaaagccaaaaaaaaaaaac

SEQ ID NO: 18126 - protein, 348 aa, Homo sapiens
MYKKVVGQFPFQDIELEKQPFPKKFPFSEFVPKVYNQIKEFIYACLKFSEDLHLSSTEVDDMIRKSTNLLLTRTLSNSLQNVIKRKNIGLTELVQIIINTTHLEKSCKYLEEFITNITNVLPETVHTTKLYGTTTFKDARHAAEEEIYTNLNQKIDQFLQLADYDWMTGDLGNKASDYLVDLIAFLRSTFAVFTHLPGKVAQTACMSACKHLATSLMQLLLEAEVRQLTLGALQQFNLDVRECEQFARSGPVPGFQEDTLQLAFIDLRQLLDLFIQWDWSTYLADYGQPNCKYLRVNPVTALTLLEKMKDTSRKNNMFAQFRKNERDKQKLIDTVAKQLRGLISSHHS

SEQ ID NO: 18127 - DNA, 5333 bp, Homo sapiens
  CDS (4210)..(4689)
cccctccttggccccaagcctggccagttgtgctaaaagtagcgctgacccaatcatggtctgtccagaggccaggactattttgactctgtcctcaggattcatgtggtctgaggcgtgtacgagctggactgctcccatgaccactcagatgtggtgccaggaatgttctggctgacacacctgtccccagagctgctaaacgctgctacttaccccacagccccacagcgtgcgtcctgagatactggttccaggagggataggtggtgaggacttgcaccaggcggtggttaggggctttctatcctcattcataagagagcaaccagccagttttgggtggcattgcttctcatagctccccactggactggagcatgttaatctgtgtatttgtgacattcactcagaatgggggcccgacaacagaaggctccttagagacagcaaacattattcttccaaggaaggctggaggatttccttctctggaggccgttaatagtggaagaacttttcatcctactggcttaaatataagtcccagtgcaaggctcctgcctggaacatcatcctcccctctactagattggctttgccattcttcaaagtccaactgaaatccccttccctaaggacttccttcttttgtcaccagaggggtacttagcacagacttcccattaatagagaggctttttcctcctttttttcttcccatctagtctgtgagttcttaacttcagatatctttcacttgccagcacccaggatgcggcagatgcccaacagttgtgggctggtgaaccagcacagccagcacggccactagctctgctcaagaaacaagtctgcgtctccttattgtgctagttcattcctcagttcactacacaatccttcaacgttggcctctttgcctgtctgcacactgtgcctggtctgcacactggaaataaacaatgtctaatgagatggggtccctgcctgagagaagctcatggcctagtgggggacacatgtcttgccatctagtgggcgaaaagcaatcattcagaggccacggtgaccagctttgcctcagggagtcgggaagggccttgcagaggctgtgatctgtggcaggccctcacagaagctcagaaaggcacgcgaggacaggcaggaggaagcgcgctccagaggagggccagcacgtgcgaaggcatggaggcatgaaaggcccttgcacctgggaaggccaaaaaatcaccatatttttgctgctttttgtctacagaccagctggctatggacagggaggctgcttggctctttcccacaaatagggaggttggagccaggcactagggcttgacctcagaaggtgtcagagctcccagagtccttgcctctctgccccctggggccatctgcaccctctcctcccatcctgcctccgctccttcccaattagaatgaaaattggctcctgtaatgctgatgtgcctactttcttgttagaatcttaataccgtatgaatcacaagtcccagctgccttggcatggtggtcaggatcagaggtttgaattaaagcaacacatggtcctgatggcttcatctgggggatgctgaggtaggggagaggctgctcctccttttccaccgataatgcgagtaccaccaaggctgctgaccgcagccttttccctcagaaagttctaagcaccttgtaacaccccctgataataagagtactcgtaccttttattgagcattttacaagtataatttcatttatttgtcagatgacttgctgatgtgtagttaggtgacgtgcctgagatttcatagctagtcataatagagccagattttgagacctcccatctcggggaccttagacagctcaagcaccactttctaataccactccaatcaaaaggaatgattttagcctgaggatgctggatggcttgatcttctgccataagagcccccaaacatcccctagcttccaggacaaaactctgacttattcagacgttcgccacaccttaattgcatgctgggtgccaggcacagggctgtggcctgaacaagtcctagggatgcatagactcagccatcctgtggcctccctcccaatggggtcacgactctcttcccactgccacccagagccttctcattctttaatgtgacctgttcagtcttccccaccactgcatttctctccttcttagcctcaacagggctcatcacccaaaccacagcattgagtgctgtgcttttgctttccttcactcagcaggcatttgtatgtcatttgtatgtggaaggcactggggatacattcagtatcccagtgccgtcatgaagcacggtctgagagagggagacagatgcgtagtcagtgcactggctgcagcatgtgggggactgagagagacacctgccctgctctctttctcacctccactcagtcctataaagtggcatcatgaagcaatggaagaaagactggacccaaatcggaagacctgagctggtgctaccatctgggggacactggaggagtcattccatctcttcatctgcaaagtgggaataacaatacctaacctgcctgcctttcagagtttcaatgatgtgctttattaaataaaatgatgattttttaatgaataaaatgcatgaaagcattttacaggttataaagcactatacaagtagtactcttctgtctcctagccatgcctagcataaatctgggcacatagtagatattcagtaaatagcagttaacttaaattgatccattcaccccgcctaccaccttctatgggcgtttgaggccattggaaaccctaacactgacaatgcctgccctgcctgggggcggcagtgaggatcaagtgagaaggatgtgccttggaagctgtcagtactgaaccatcttggtcttgggaaacctccctggctccccattgtgggggcttggctgaggactggccagcccgggatgtggagtctcgggcatggggcaaccttcctccaagccctaggtccattctctgtggggagcaaacatgacacttccccaattttggttcccaaaccactcgggctgcctggctcaggatagtgcccatggcgtgggcacagtcccttgggggggccagatcagcatgtgcccagccctcactagtctccacctctcgtttcagcacccctaccccacggaggatgagatggaagaggaggaggaggagctggaggaggaggtcgacgagctgcagacgacaaatgtcagcgacctgggcttggaacacagtgactccctggagtagtcgggcagcccagatggcactgatcactgagcaggagaggagtgtcgccgggaggccttcagggtgggggggaaggggacatgggcaggaagcaccgagggagttgggccctagcttccccaaatcagtagcttgaagaaaggcaaaggagacacctgttccttcccaaccaccgagcttcaatgaggaccccagccccacttccctggaactgtcgaggactctgtttggcggggccagtcgagcagcctgtgtggaaagacaggagtgagatctggactcaccaaatccctgaggacagatggcacccatggcccccacccacggaaggacttgagttgtttacaagccctgcactgaggcagattggtgctgttcgcagagtaggcctttgcccgggggcagacttagaaggaaggggagagacaaagggggactgagtttcatccccagaagtttctcagctcctttgacagacattcaagggcaggagggagccccaaagcataaccagtggccagaggagtgggagggcctgaggcatcacatcttgcagatcagaatgggatggaatccaccaggctccagctcatccctccaaggccctgtctctgcgcacagcaaccatggacatgggagaaagggatgggagccacagtgcccttcactctctcctggaaaccaactgtaagctggtgggctcaacctgtgggaggttaagaggagtcccttctgggttgactccaagagccaaggagatggcagaccctgggctaggaaccatatggaggtgactttgaggccacagctgtccctaggtgatcacagaacttagctcctttaacaacaggacaatggtttttttaccctagatgttcccaccttcagtgctccacgccctccatagaccttcagagaaggtgaaaccaggttatctgggaatctttccagcccgcaggtcgccacggccatccctttgctcccagcctggctccatcagcctccagcttcctttcttcattctgtccttcagggaaggcagaagaaacattggaaagcatctagtccagtgggaagccaggggttggagaaggtgttacatccctcttcccatcaatatcctaaatgtgggggagggcccagagaatggcacccaagagcctgcggggatgcccatcccacacaccccacccagctgttctaaccctgctatccacagccctggaggaactggggctcctggaaggaggaggaggctctccactgtccaccctaacacataccctcccacccaccttccagacccccttggttggcaccctctcctccggttccctctcaccccatggctgtgaatgacaggacaggtcacacgtgtgttttccattgggtttaatttaatggacgtgcagtttcatttgtaaattgtgcattagccacctccttcagtggcaggatgtgagtggctacctggctcaactggaggggaccccttgggccctctggggcttcccctcccccacctggttggggtagagcaaaaggatggtcactcttccgaggtctccctgaaatgaatgtatttctcccccaaaagagctgatatttaatgttttaataaggatttttgagaaacaaataaccttatttataatctgggtgatccaatcattttttactcccttttgatgccatacatagaggaaagtctagcttttttggcgtgagacttttgcaatgtgcagtgggataaaatgcacttccttttctggttcgtttttcttgttaacacgcgcacacagacacacacacacaccgttccactcaccacctggacaggcgtcccccagcacggacacactggcacacaggtgcccacatctcttcctctcagcccctccacctgcctaatgttatgcaacctccttctgatgtatccaccaaaccagtactgaatgtggccgagacgttttcagtaaatcttattacctaccgt

SEQ ID NO: 18128 - protein, 160 aa, Homo sapiens
MFPPSVLHALHRPSEKVKPGYLGIFPARRSPRPSLCSQPGSISLQLPFFILSFREGRRNIGKHLVQWEARGWRRCYIPLPINILNVGEGPENGTQEPAGMPIPHTPPSCSNPAIHSPGGTGAPGRRRRLSTVHPNTYPPTHLPDPLGWHPLLRFPLTPWL

SEQ ID NO: 18129 - DNA, 4590 bp, Homo sapiens
  CDS (506)..(1045)
aacatggtcatttttattaaagtaaaaaataagatagtagtagctctggacatttggaaatgtgtatgtttgtttacaccctgtgaaaagtagacatggtctgcaaaagagccaatctcctaaatatatttctttctctagaaatgttattttgggacaaatgaatgaatccctgttgggaaaaaagaacctgctgcatatcatccatattttattttattattattttttttgagatggagtctcactctgtctcccaggctggagtggagtggcacaatctcggctcactgcaacttctgcctcctgggttcaagcgattctgctgcctcagcatgcccagtagctgggattacaggtgcatgccaccacacccggctaatttttgtattttagtagagacggggtttcactatgttggccatgctggtcttgaactcctgacctcaagtgatccacccgcctcggcttctggaattacaggtgtgagccaccgcacccagccatgatccatactttaatgtgggttctggattgcttcctaggccacgtgtttaacatgccacatgatgatgcaaagcagtgtgccagccttaatggtgtgaaccaggattcccacatgatggcgtcaatgctttccaacctggaccacagccagccttggtctccttgcagtgcctacatgattacatcatttctggataatggtcatggggaatgtttgatggacaagcctcagaatcccatacagctcccaggcgatctccctggcacctcgtacgatgccaaccggcagtgccagtttacatttggggaggactccaaacactgccccgatgcagccagcacatgtagcatcttgtggtgtaccggcacctctggtggggtgctggtgtgtcaaaccaaacacttcccgtgggcggatggcaccagctgtggagaagggaaatggtgtatcaacggcaagtgtgtgaacaaaaccgacagaaagcattttgatgtgagtttttctactgaaacacattcagaattgaaaagaacaaagtgatggtaaaagatatgataccaagttaaacatccccatccgtgtcctctagcaggaatgcgagatagcttatttttagaactgattctttgtcccatgtggctttctttgataccctaaaagttctctttagataattctaatgctgatgatttatgtctccatttagacgccttttcatggaagctggggaatgtgggggccttggggagactgttcgagaacgtgcggtggaggagtccagtacacgatgagggaatgtgacaacccagtcccaaagaatggagggaagtactgtgaaggcaaacgagtgcgctacagatcctgtaaccttgaggactgtccagacaataatggaaaaacctttagagaggaacaatgtgaagcacacaacgagttttcaaaagcttcctttgggagtgggcctgcggtggaatggattcccaagtacgctggcgtctcaccaaaggacaggtgcaagctcatctgccaagccaaaggcattggctacttcttcgttttgcagcccaaggtagttcgtttttaccttatttttacctaaaaatcaaggcctgggcttgctaccttttcaaacaatttttgttatactatctttgctttccatattaacatatcttcaatttcaaatttgaactccttttcttttacattaattggcaactgcctgctttgagtttagtgttttcagttatgaatgaagcttaaatctaacacttcacatgcttgcaattgctcgctattactcttttatatgcaaagaaaagctttttggacagtcaagcgctcctctgtgcgactaggcttcacatacagctcatagttagatacattttatattcacacagtaaccagtagttttggaaaatagtctatgcatggtccaaaatacttgttactgggtaactagcagtagcaggtgcaaacagaataatagaagtggtagtctgagtattgattatttttatgtttgaaaacacatattgaactaggaaaagcatcatttcttttgctgttttgctaagggaatacatctggatctgagacagaaaatggaatttaatgtgattgagatgatcgtgtgtcattagcaccataggctatgaaaatattcccaagttgcagattcaatattcagcaagtgatttctgaagcacttactcttgccagatactaattattctaggctctgaagatacagcagtaaacaaagtgacaaacagctctactttcattgaccttagctggaggagacataggtcaatagataaataatttttaaaaatatctaatttcttcagatgtctatacgtagtactgaaaaatatgccaaagtgaagggtaaatgcatgaaatgcataatgtgtagagggtactgtgtttaattagcatggtcaggaaagtagagagaaaatgtttacacttatcattgcagcatctccttcctttgcttgtatgtaacactagacatgtgtccttttttcaggttgtagatggtactccatgtagcccagattccacctctgtctgtgtgcaaggacagtgtgtaaaagctggttgtgatcacatcatagactccaaaaagaagtttgataaatgtggtgtttgcgggggaaatggatctacttgtaaaaaaatatcaggatcagttactagtgcaaaacctggatatcatgatatcatcacaattccaactggagccaccaacatcgaagtgaaacagcggaaccagaggggatccaggaacaatggcagctttcttgccatcaaagctgctgatggcacatatattcttaatggtgactacactttgtccaccttagagcaagacattatgtacaaaggtgttgtcttgaggtacagcggctcctctgcggcattggaaagaattcgcagctttagccctctcaaagagcccttgaccatccaggttcttactgtgggcaatgcccttcgacctaaaattaaatgcacctacttcgtaaagaagaagaaggaatctttcaatgctatccccactttttcagcatgggtcattgaagagtggggcgaatgttctaagtcatgtgaattgggttggcagagaagactggtagaatgccgagacattaatggacagcctgcttcagagtgtgcaaaggaagtgaagccagccagcaccagaccttgtgcagaccatccctgcccccagtggcagctgggggagtggtcatcatgttctaagacctgtgggaagggttaaaaaaaagaagcttgaagtgtctgtcccttgatggaggggtgttatctcatgagagctgtgatcctttaaagaaacctaaacatttcatagacttttgcacaatggcagaatgcagttaagtggtttaagtggtgttagctttgagggcaaggcaaagagaggaagggctggtgcagggaaagcaagaaggctggagggatccagcgtatcttgccagtaaccagtgaggtgtatcagtaaggtgggattatgggggtagatagaaaaggagttgaatcatcagagtaaactgccagttgcaaatttgataggatagttagtgaggattattaacctctgagcagtgatatagcataataaagccccgggcattattattattatttcttttgttacatctattacaagtttagaaaaaacaaagcaattgtcaaaaaaagttagaactattacaacccctgtttcctggtacttatctaatacttagtatcatgggggttgggaagtgaaaagtaggagaaaagtgagattttactaagacctgttttactttacctcactaacaatggggggagaaaggagtacaaataggatctttgaccagcactgtttatggctgctatggtttcagagaatgtttatacattatttctaccgagaattaaaacttcagattgttcaacatgagagaaaggctcagcaacgtgaaataacgcaaatggcttcctctttcctttttttggaccatctcagtctttatttgtgtaattcattttgaggaaaaaacaactccatgtatttattcaagtgcattaaagtctacaatggaaaaaaagcagtgaagcattagatgctggtaaaagctagaggagacacaatgagcttagtacctccaatttcctttctttcctaccatgtaaccctgctttgggaatatggatgtaaagaagtaacttgtgtctcatgaaaatcagtacaatcacacaaggaggatgaaacgccggaacaaaaatgaggtgtgtagaacagggtcccacaggtttggggacattgagatcacttgtcttgtggtggggaggctgctgaggggtagcaggtccatctccagcagctggtccaacagtcgtatcctggtgaatgtctgttcagctcttctgtgagaatatgattttttccatatgtatatagtaaaatatgttactataaattacatgtactttataagtattggtttgggtgttccttccaagaaggactatagttagtaataaatgcctataataac

SEQ ID NO: 18130 - protein, 180 aa, Homo sapiens
MIHTLMWVLDCFLGHVFNMPHDDAKQCASLNGVNQDSHMMASMLSNLDHSQPWSPCSAYMITSFLDNGHGECLMDKPQNPIQLPGDLPGTSYDANRQCQFTFGEDSKHCPDAASTCSILWCTGTSGGVLVCQTKHFPWADGTSCGEGKWCINGKCVNKTDRKHFDVSFSTETHSELKRTK

SEQ ID NO: 18131 - DNA, 4255 bp, Homo sapiens
  CDS (1103)..(1768)
tatccatggaggaaatcatacctcctaaaacctgtggcactgaatggggttcagccattactccacaaattcctatagcaagggctaaaccctgccagtccccaggcaacacctcggtcctccctgttaaaaagcctaatggagaatatcagtttgtgtaggacttgaagggggtaatgaggcagtcattcccatccacccaacactggtcccaagcttgtctgtgctcagatacctggagatgctcagtttttcactctactacacttcaaggatgctttcttttgtgtagccctctccacccagaatccctgtatctttttgctttgaatggagaaatctctgatacccagaaagccacatagtacacatggactgtgcttccccagggcttctgggaaggcccccacctttttgggaatgcagggagctaagcctacagaatgggacttttattacaatatgtggatgacttgttcattgtcagccaaacatggcaggattcagattttaatatcattaaaaccttgaatttcctggctgagcggtgatacaaggtcagccccatccaaggcccagatttctttacagaagttccgatatctggggttcattctgaccccaggagcccgaacactagttgtggactggaaaaagcaatcacttcattgctggtcccacaaacaaaaaggcagccccagggtttcttgggaatggtgggcttctgtagtatttggattccaaattatggcctgacggctaaacccctatgtgagacccaaaagggggaagaaagagagcccttgtactgggaggagaaatgtcaactatcttttgaacctctaaaaactgagctgggtcaagcccttgtccttggactccctgagaaaaaccacttaccttgtatgttcgtgagagactaggaatagctttgggagtcttaactcaaaggttaggacctgttcagaagccagtggctcatttttcgaaacagacaaatccagttgcacagaagcggcctggctgctggagggcagtggcagccactgccctgctgtttagtgaagcatctaagctgacaccgggacaatatacagaagctatgactccccaccaggttcagaccgggttagaagtcaagggacaccattggctcactgcagggaggctgaccaactaccaagctctcttattagacaccctggatattacgttaagggtatgtcagactttgaacacagcaacctcactcccaaccacagatgatgaggactcacagcatcaatgcacagggcccacaaaacagactccagcaggcctagcttgtgagataagcctcttgagaatgcaaagacggaatgatatcctgatggcagtagctttgtggagggagacccaaaaggcaggacatgcagtagtaagcctgaaggagactacagaaactaaagcccttcctccccaaaatggcacaaaaagcagcactagaggccttaacagagcctcacaactgggagaaagggagggagtaaatttatacaccaactcaaagtataggtttctcctgctgtgtgcccatgcagccatatggaaggaaaagggaatgttaacagttaaaaattccccaggcaaacgtaaggatccaatccaacttctcctggaagcggcacaacttccctgccaggtggcagtcattcactgcaaaggccaccagagggactggtccctcatcagccaaggaaatagggccacaaaacaggcaacctggttataggaatccagcaatgtgttggccttaatgacagaccctaccaaccttcctaatcacctacaatactcacaacaagagcaagaggaagctaaggggcaggggtaccaggaaaacagtgctggatggttcacagatggtgacaagttttattccaggaactgaccagttgaaagttactaagcatctccatgatgccactcattaatggagagatgttttatggaattctgtccataaaatattcaccagaaagaaactaagaaaaagtgtaaaacaagtaacctttgtcagtgaattgtgttcccgaaataatccccacacccatccaattcccccttcttgacttaaactggttcaacacaggggaacttatctgggagaagactggcaggttgttttaacccaaatgactccaaatctagggtacaaatatctcctggtgtttgtggatacttttactggacgggtcaagggtttccctacctgtacagaaaaagcagtagaagtctgtaaaccttcactaaaggaaataatttctcaatttggactccccaagtcccctcagagtggtaacaggctctccttcatgggtaagattactcagagcctctccacaaccttaggaatagattatgaactggcaccccaatcatcagggaaagttaagatgaaccatacacttgagacgactctagccaaactctttcaggagatgcacgagtcctgggttaagatgctcccagtcttctcagggtccgcagggccccttcgtgcagcctaagacttagttcttctcagatgatctaccagaggcctttcctcaccactgacctcctgttaggtgaagaattacataaaaaattacagtatcgatttaggacagattcaaaaggtgacttcagaatatggaaacaaaatcctgccagcccccactaaggatgggaaaacccctttacaagttaatccaggggaccaagtcctcctaaaggcttgaagggcaggctccccggaggaccaccccttgcttaaatgggagggcccttactgggtgatcctgaccactccaactgcagccaactcacaaggaatcactagctgggtacacctctcccgatcagaaatgctttctcctaaatgtttccagactcgcccagatggcccactttactcctgaaaacctgtggaagacctcaaattcaggagagccaattcatcatcggagaagtaatgtggttagagatcttgagtccaatacttttccttgtattactaattggtttactattattctgttgctttgctcagcctcctccctcaggtaaagacttcgtttgtccctgctgggtataaagatgctactctttactttgttcctactcctccccatcagggcacagggtaggctaggcctactaaaatgagaaacaaactctcttgacaacctttccggcattatagcttcaggtaataatttgtccaactgctgggtgtgctaccatcatccccaggctcagaggggctgcctcttgcactccctaaaagctcaactaccaacttcacaaaagaggtatggaaacctaaaataacctctgcacctcttatggtggacctaagtgtctccctttcctttgaatgtataaacctcattgggctgctaaatgctttggtcaccaaaaagggtggaaaaaagagaagttggactgcctactttgaaatcccaccgggttttctcttagcagtaaagaaaaaccctaatcaaacttgggctcaggaaggctatcttttcccccatgccaaaacagtcatacctctctccacagcttagctgctcacctgaactcctctcgccttgtgtaagtttgtgcacccatggggtattctgttcctttgtggacacccagactgccatctgatcaacagctacccttcagccaatttcacctttctgttacttgcactagcgtgcccttgtgtggataatgtacaacgcaataaggaatgcatgttaggtactttaagtcccagtagaataacagttcataatatcacacatgtggtgaaatctaaaaaggcaatagggctaattttggcaggagttggaatagccccttgggatggctttgcatactgtcagacagctttgagaaactttcaaacccttgaaacactggcaactagtacaggcagagccataaaaggacatcaagcctccctgcactccctagccaatgctgtcttggataacagatttgccctggaatatcttctggctgaacaagggcgggtatgcacagtaataaaccacatctgttgttcttacattaacagttcaggattggctaaactgcaagttcaaaagatttaccaagaccaggcacaatggttcatgcctgtaatcccagcactttgggaggccaaggtgggtgggtcgtttgagcctaagagtttgagaccagcctgggcaacatggctaaaccccatctctac

SEQ ID NO: 18132 - protein, 222 aa, Homo sapiens [sequence omitted]

SEQ ID NO: 18133 - DNA, 4430 bp, Homo sapiens
  CDS (99)..(461)
acaactttgtgttttgttgttgtgttgtgttttctctttcagtttcaaagaagctggcaccgattccacccaaggtcccctttggccagccgggggctatggcagaccagtccgctggccagccgtccccagtcagcctgtcccccacccagcccagcaccccgtcaccctatggactgagctaccctcaggggtactccttggcctcgggccagctctccccagctgcagctcctcccctggcctctccttctgtctttacaagcactttgagcaaatcgcggcccactcctaagccgcgacagagacctactctgccgcctcctcagcctcccacagtaaacctctcggcctctagtccacagtccacggaggcccccatgctagatggcatgtcccctggggaaagcatgtctacaggtaaccaagccacaggctccctcacttttttttatgaactttagtgaaatgtgcctaggggatggattgctagagttactgccagtgaacacattcctgcgtgctttgggatgactgggctggcaccaggggtagctcataagatctccttagaagcccaccaatggaaagcaaccctggaatccatgtgtcccacacaggggcttcttatgggatctctctcggtctaagcccaccagcctggggttctgtttttgctcttattatcgggggttgaagacactgagtcatttggagtggggcctcaggagaggctggaagctggttatgatcacaaaacagcatcaaaactcaggtatttcctggatagagcccaagcaactgacaggtataaatgcttatctggagaacaggggctaagaacccaagatgtttttttactattactaaaataagccttgctagaaaaatatacttccagatagatatttagagaggggtgaatttcagaaaacatgcatgtctccattctcctccaccagactcccctccctggccaattccctgaggagctaattggacaaacccacaacgacttaatttagtttgggcttaaatttagaaacaaagacggagctctcttcccccagaaaaatctgtaagcacaaaatcgcaaacacacaccacgtttagccaaaaccattcattggctggaaggaacgggatgtttttggaacatctccccagacacttcaaccacataagattataaagtcaggggcctatttgtggtggctgctaaagtcatttgagcattttccttgttcagggagacaggcacagggttgagccgtgtcttgggctagagccaacccacttagtaaagtgcagtagcatggcggtgagctggagcatatgtgtacctagtgttgtcccaagtagcagaaggtgaggcagcttgggttggaacacacacaccacatacacacacacccactcacccatttcaaagaacagtgctgtcctaggatgcactgggacttttgtgataatgcacttttccctccacgtccttctccaaaagagtgatttatttcttccgtgattagacggaagcagtgaccctgtggggttcagctccgtgctgcctttgaaaaggctagtccaatttgcaagtgtttgtactgggtcagatttaaatattacggggaagagccatctggtgattcggcttctttatttttggatgtgattaatgttgaaggtacaagctgctgtcatctaccccgaggcttattaaaaattaggcaaatttctccctggaaaatgcagtagcaccacgcccatcttggtgggtcttggtgctgaggtgtctcctgaaggagcccatgataggagggcacaggcttgctgccctcggggaaggtcacagctgcggaggagctgaaggtcacccgagccaggtctccagggctgctcctcccagtgtgtcacatctggtgactcttccagccaccccagggaagggacacaaggtagtgtcaatacataagcaatagaatgagcagaagatggccaggcacggtggctcacgcctgtaatcccagcactttgggaggccgaggagaattagttgggcatggtggcacgtgccactagtcccagctacttgggaggctgaggtaggagaattgcttgaacctgggaggtggagccgagattgtgccactgcattccagcctggcaacagagcgatactccacctcaaaaaaaaaaaaaaaaaaaaaaaaagaatgagcagaagatatcaatggagaagcagataagagcagaaggagaggagaaattggggaacaaaagtgggcaacagaaggcctgggaggacagcacccccagggctctaagaagcggagtggctcatgttccatcttacaggtttaagaactcctgaccttcaggattcataatgtccctcgccctgtgcggaccctattttaatgtccttttggcagcagactgttgttttgtcccatacgttcaggtctctgagccagtgtagaatccatcatggtttgatgtggcccgtctgggactgtgatattggcatagcttttttttttttttgtgacgttcatgttttgtcgtgttgattcctttctccgaatcctatcattgtgttcttgcagctgtgtgacatgagtggcgcagttttggatacgtgtgagggggattttcagggtaagctggccccggcctcgcccctccaccccgctagctagccaggccagctgcccgctcctcccctccgctcctcgtctctgcatgtggctcagaccatttgtatggcagcttcactctccagccttccccggcctcagcaaggatgagttgatccatgagcttatttggctttggggcagccctggcctccttttctttcttttcattaggaggagctgggggagaacccagccagccccttttccccaccttctctttcactggaatcacatctgcagctcctccccctccgccctccctcaggcttagaccgtggagctgtaacagatctgttcttcgtgtgagacttttgtgctggagacgcttgtgcccagcaccctgggggacatgcacctgctcacctttgtttaggaaggcgtcctgaggggaggtcataccaggtgcagcccagcacagggtccacaccacagcttggaccccattttctgtggccccgagtttgcaccagcagatctccccttccagacttagatcctaacgtctggcttcctccaggctgagactgctggcaaatcctaaagaatccatatcggagctcatcccgctccccttctccctcatcccaagtggatatggccagacagatcctttctatccaactcaataaaatttgggggagcatttatatcagtatctatttggtctcctcctcctataaagagtaaatcctcaaagcataactgagggaaaggcacgaaggaagccagaaggactttggtgtatttgcctcagtaagtagaggtggccaaagtaaaccaggtcttctccccgatttggcccatggtcctgcagagactaccgaggcgcaccaggatatctggtgctcacagacaggtctcctggcgggtgcttcccgagtgtcctggagacaagcagccactgtgtcccttttcccaggaatgctgatgagggcttctgcccctgaatcccattcccttgcatagtgactcctcccttgggggtgtctttaagggagcagcaaggataaaggtatgacagctcacacaagtgcttgttctgggcctgtctaaattcatcaccgccctgtattattcccatttgactgctgaggcacagggaaggtaggaaacctgtccaaggtcatgctcttcctgcctgacatatttgggatttttgaatctaagcaggggagcttggtgctcttacctgatagcgaaccctgcacagtgaggtgggccccgggccactcagcctcacacctgtgtagagacatgacccaagtagctggggaagggcagaggtggtctgaggccacctgcttcagaggaacaagtggcactggctgttcctccagccccacgccccaaatctctgcttctccatcaggcagcaaaacaaagactggaaggacgtgagggctgcctgggggttggggcaagggaggacctttgttcaagagcttccatgtttgtatgatgtctttcaggacagtgtccaaatgtatgtctgtacacttagtatggtattccccagtctgaacatgtgttcccttcctctgcctcctggagtgctgctcccagccttgcaaagctaagtgacagccagaaactaagcaggcaggccgggcgtggttgctcacgcctgtaatcccaaaactttgggaggctgaagtgggtgaatcacctgaggtcacgagttcgagaccagcctggccaacatggtgaaacccaatctctactaaaaacacc

SEQ ID NO: 18134 - protein, 121 aa, Homo sapiens
MADQSAGQPSPVSLSPTQPSTPSPYGLSYPQGYSLASGQLSPAAAPPLASPSVFTSTLSKSRPTPKPRQRPTLPPPQPPTVNLSASSPQSTEAPMLDGMSPGESMSTGNQATGSLTFFYEL

SEQ ID NO: 18135 - DNA, 4035 bp, Homo sapiens
  CDS (94)..(975)
gggatcagggcggggccctgagcgccgccatgcttttgtacggcaggatcgcaaagcacgccgggaccggttggtttggttttgaagacgtggatggcgggaattctcgcttctggcctgggtgttttagctcacttggaaaggctagagacccaagtgagcagatcccgtaaacggtctgaagagctgcagagcgtgcaggcccaggaaggtgctcttggaaccaagattcataaactaaggcgtctgcgagatgagctgagggctgtggtgcggcaccggcgagccagcgtgaaagcatgtattgccaatgtagaacccaaccaaacagtggagatcaatgagcaagaagcattggaagagaaattggaaaatgtgaaagccattctgcaggcatatcattttacaggcctcagtggtaaactgaccagccgaggagtttgtgtctgcatcagtactgcttttgaggggaacctattggattcctattttgtggaccttgtcatacagaaaccactccggatacatcaccattcagtcccagtcttcattcccctggaagagatagctgcaaaatatttacagaccaacatccagcacttcctgttcagtctctgcgagtacctgaatgcttactctgggaggaagtaccaggcagaccggcttcagagtgactttgcagccctcctgactgggcccttgcagagaaacccactgtgtaacttgctgtcatttacttacaaactggatccagggggtcagtccttcccgttctgtgttagattgctgtataaggacctcacagcaactcttcccactgacgtcaccgtgacatgtcaaggagtggaagtattatccacttcatgggaggagcaacgagtatctcatgaaactctgttctgtacgaagcccttgcatcaagtgtttgcctcatttacaagaaaaggagaaaagttggatatgagtctggtctcctaatagattgttttcactgcactgggagcacatcagagaaataaatcccccctcccctgccaggtgaaaggaaatattgcactttctgttctcatgactaaggggacaggagttccagaagaacctttcaagatgatcaggaacaccaggacgagggccgtctcacctcactcggaccacatggagacctcccttcaaaatgggagccatgtcctgccccaccaagccctgtctgaagtggagcttccccgcctgtgctccctccacagtcccggaaagcccagcggcaaaggcagctttgtcccagctctgccaccctcctgctcacagtggtcagggcccctcaggggcaaggacggcagggattggaacgagggctctggaaggactgttcagccctatgcctaagacccctatgctggggacactacaggcacacagaggaatagcagggccaccctcagagctcacacatccacgaacaaatgaaggctgaggaggtttctaaacctaaagtccatgagtgtgcacttcaatccaggaaggtcgggacttccttcagtttcaaaaaataaattctcccttccggtttggactgttgcaggctcgaggccattcaggagttgtccaccacctggtggggcagtgtgacagaggggccattggggaaggtggctagcttatcccgccccttcaagaagaaggtcagcagctcccccttccccttcacaaagatggggcctcgcctcacaaagcggaagccgtactctcggaggatgacttgggtttcttctaccacctggagagggagggggagcaagaacgtggcgttacggggggagcctagactgagggcgggtgggggctttgggtggttggagccgagcactgatccatgggtcccaagcagtatgggacactccccaaacctcccagggccaagcccttccacccgtggcgagcagcgggtgggaaggagaaccctggagtgactggctgggggcctcctctcatccagagacttctctcctaggatggccatggtcacctgggtggcagcactgttacctggaaactgccactgcctgctcttctgtccctttgcccctttcgtggagcttttctgccagacgccactgagacagatcacaaggtattagaaggttcatacccaaaggtaggccatatgcatctagaacttcagcccagattttgtggatgggtggaagtgtttcttcctgtgctgaggctagctattgcagagattcttttccacttgccccacgtctctgcctctggacttaccgttcagggccagggtgggaggcaggggcacgtgggaaagcactgttccggttttgttctcatgccgagtctgagcacgtgccagctgtgccactggacatacctgaatgttgcccatgacccccgtggactccatcctgctggctacattgactgtattgccccagatgtcgtagtgtggtttccgggctccgatgaccccagccagaaccccgcctttgttcatgcctagggtagaggcataaagttcagcacagccacaggccacaccttgttatgggcctcagaagccatctcctctccagacctgtaccacaaagctcctaatgtaacacatcattgtcctcattcaacttggctgtatgctattggagggtggaaatcacatctcctgtttatccgtgtgcttgttaggtgtcagccgccaccccccccccatatgcagatttactcggcatggtagtggccagcttctaacacagctggtatttcaagtctcctgggacctcactcaggaatgataccccctcagtagaagcagcaggtgatcttaactcctttcaaagagcaggcctgtctgggaagccatgtcctcagcaggcacagcaacccctctggaaatggatcacaaactcacttctcagccaggcaggccaagcttctgttgtaacagtaggcacagtatagtcggatcatcatatcagctgggtttttggtttagtcatctagagtcgtctggactaaaggtctttcaggtctccttgccctgtgagtgcgtgaacctccccacccgaattgcctcagttgtcctgagcctcatgtctctcctggtggtgggccaggcccctgcatgggaagggagcctgctgcggggcaggccagctgggggtgctcacctatgcgcagcatgaagttattgaaggactggttgttgatgttggtgagcgtatccttcatggccagcgcgaagtcggccaggtcagccaggtgctgccagcgctctctctcggacttgtcttcctgtgccaggggaccgtggagaaagtgtcaggagccgctcactgcagcagcctgctctgctgccttccctggcagtgttctgggggtggattccctacacctagatgttcaaggccttacttttcctcccacaaaggagtcgcagccacgctagctctgacttgccactgtgacaaagttcacgtagcaggtctaggcaaagactgggcaattgagcagaggagacggacctgtgagtctgaccacgaggcggaccccttcaccttggctgggcctggtcctggtccttaggttttgtcaggttgtccttgtttggatccctcaactaggtgataagcactggagggggatgacccgccttggacgtgtttctttaacctcatccatataatagggccgtgggatggttgtagaggtaaagcaggatgatggtgttttaagaccagagcttgggaccagggctcctacacctaattttctctcctggtagctgaacaaaggtctaaattagcttaacaaaagaacaggctgccgtcagccagagttctgaaggccattctttcagtttcccttgttgacaattgctctccagttcctatgaaagcacagagccttagggggcctggccacagaacacaaccatcttaggcctgagctgtgaacagcagggggttgtgtgtctgttctgtttctctgcttgccgaactttctcaataaaccctatttcttatttat

SEQ ID NO: 18136 - protein, 294 aa, Homo sapiens [sequence omitted]

SEQ ID NO: 18137 - DNA, 4031 bp, Homo sapiens
  CDS (1945)..(3108)
agaatttagctttttcaggaactgccatactggcttttcttttgtttttttgttttgagacagaatctcactttgttgcccaggctggagtgcagtggcactctctcaggtcactgcaacctctgcctccgcagttcaagtgattctcatgcctcagcctcccaagtagctggaattacaagtgtgcaccaccacacctgtttttgtatttttttttttttttatgagacggagtttcgctctcgttgcccaggctgaagtgcagtggtacaatctaggctcaccacaacctccacctcccaggttcaagcgattctcctgcctcagcctccccagtagctgggattacaggcatgcgccaccacacccggctactgtttttgtatttttaatagagatggatttttgccatgttggccagggtggtgttgaactcatgacctctagtgatccacctacttccgcttcccaaagtgctgggattacaggcgtgagccactgtgctcagccccatactgggttttgtatcagcatgtatattttccattcccaccagcagtgcagactgttgcaatttctccacatccttggcaacacttactattttttattatggcctttctaatatgtgtgaagtggtatctcattgcggttttgatatgcattcccctaatgaccaatgacatcgagcatccattcctgtgtttattgaccatttgtgtatcgatttttgggggaaatgtaagatctgtaatttttttttttttttttactctgtcgcccatgctggaatgcagtactgcaatctcggctcactgcaagccctgcctcccgagttcatgtcattctcccgcctcagcctcccaagtagctgggactacaggcgcctgccaccacacccggctaattttttgtatttttagtagagacggggtttcaccgtgttagccaggatggtcttgatctcctgacctcatgatccacccgccctgccctcccaaagtgatgggattacaggtgtgagccactgcacccacccttttttttttttttttttttgagacagagtctcactctcattgcccagcctggggtgcagtggtgtgatcacagctcactgcagccttgacctccccagggctcaagtgatcttcccacctcaatctcccaggtagctgggactataggcttagaccaccacacctggctagtttttttgtttgtttgtttttggtttttttttggtaggtccggggtcttgtcatgttgctcaggctggtctcaaactcctgtgttccagtgatcacctgcctctgggcctcccaaagtgttgggattacaggtgtgagccaccacgcccaaccagatctgtaattttttttttctttgagactgagtcttgctctgttgcccaggctggagtgcaatgccacgacctcggctcactgcaacctctgcctcctgggttcaagtgattctcccacctcagcctcctgagtaactggggttacaggcatgcaccaccacgcccagctaatttttgtatttttagtagagatggggttttacgatgttggccaggctggtctcaaactcctgacctcaggtgatccgcctgcctcggcctcccaaattgctgggattacaggagtgagccaccatgcctggcacagatctgtaattttttaactagaaaataaaatcattatcttgtgctacctctcaagtatactcttgtctttttcagaagccttgaagaaccaatgtactgatgtggggattaaagagggtccactttccccagcacaaacctcacaagtcactagtctttcctcatggacggggtatttactttttcaaccagtggcttcttcccacttggagcaaagagaagccctgtggatagaggaaaaaggaactcctcaagcctcctgttcagattggatgactgtactaagaaaccaagactcaacttacaagaaggtggctttgcaggaggaaccagccagtggtataaatatgataaagcttatcagagaagatgggggatggaagcagttaggggacagccatgaagacccccaggggcttttgagccaaaaggcatcccttcacgtagtggccattcctcaggagaaggctactgcatggcatggatttggggaaaatggtaatctgagcccagcccttgttttatcacagggaagctctaaagggaaccacttgtgtggcagcgagttagatattacaagcttggcatccgattcagtcttaaaccaccatcagctgggatatgcagatcggagaccttgtgaaagtaatgaatgtggaaatgccatccgccagaacagtcactttgttcaacacggggggaagatgtttgtgtatttggaaaatgggcagtcattgaaccacggtatggccctgactatccacaacaaaatcaacacggcagagaaaccctttgagtgccaccagtgtgggaaggtgttcaaccggaggcattctttgagcgaacatcaaagaattcacacgggggagaaaccctacgagtgtcaggagtgtgggcgagcctttacgcacagctccaccctcacgcgccatctgagaactcatactggagagaagccctacgggtgcggtgagtgcgggaaagccttcaacaggatctcatcgctgactcagcatcagaggattcacaccggggaaaagccctataaatgtgaagactgtgggaaatccttctgccagagctcttacctgatcttgcacaagaggacacacaccggagagaagccctacgaatgcagtgaatgtggaaaggccttcagtgaccgttcctctctcaaccagcacgagcgaactcacacgggcgagaacccctatgaatgtaagcagtgtgggagagccttcagccagaggtcttcccttgtgaggcacgagagaactcacactggagagaaaccctacaggtgtcaggaatgtgggaaagccttcagccagagctcatcccttgtcacacatcagaaaactcacagcagccagaaaacctataaaatcattgactgtgggaaagcgttctaccagaacagacatcttattggatattagcaattgcacgctgctttgtaagccactttttagtactctgacacatacatgtggttatcttttgccctgttgtgatggataatttgaaaagaagtgggtttatgtcaccttctcaccttcttataagaaagctctgagaatgggcatttttgtattttgttgttgttgttgagatggagtctgccacccaggctggagtccagtggcgtgatcatacctcactgcagcttcaacttcctgggctcaagtaatcctcccaccccagcctcccaggtagctggtactataggtgtgcaccaccacgcccagcaaatttttaaatttattatagagtgggaggcagggtgcggtggctcatgcctataatcctaacactttaggaggccaaggcgggtagatcatgaggtcaggagatcgagaccatcctggctaacacagtgaaaccctgtctctactaaaaatacaaaaaagtagccgggcgtggtggtgggcgcctgtggtcccaactactcaggaggctgaggcaggagaatggtgtgaacctgggaggtggagcttgcagtgagccgagatcgcaccactgcactccagcctgggagacagagcgagactccgtctcaaaaaaaaaaaaaaaattatagagttggggtcttgctacattgccaagactggtcttgaactcctggggtcaagcatcctcctgtcttggcctcccaaagtgttgggattagaagcatgagccgctgtgcccagcctgacggggccttttagtgggaggagttgccattacactacgtccagtaagctccagactttcggaaaagattggtggacgggaatgctgtcatggatgggatcttgccaagaaccatcacgtgttaatttagttgcttaaacaaaaggtgttctgtttcttaact

SEQ ID NO: 18138 - protein, 388 aa, Homo sapiens
MTVLRNQDSTYKKVALQEEPASGINMIKLIREDGGWKQLGDSHEDPQGLLSQKASLHVVAIPQEKATAWHGFGENGNLSPALVLSQGSSKGNHLCGSELDITSLASDSVLNHHQLGYADRRPCESNECGNAIRQNSHFVQHGGKMFVYLENGQSLNHGMALTIHNKINTAEKPFECHQCGKVFNRRHSLSEHQRIHTGEKPYECQECGRAFTHSSTLTRHLRTHTGEKPYGCGECGKAFNRISSLTQHQRIHTGEKPYKCEDCGKSFCQSSYLILHKRTHTGEKPYECSECGKAFSDRSSLNQHERTHTGENPYECKQCGRAFSQRSSLVRHERTHTGEKPYRCQECGKAFSQSSSLVTHQKTHSSQKTYKIIDCGKAFYQNRHLIGY

SEQ ID NO: 18139 - DNA, 3594 bp, Homo sapiens
gaggcctccctctagctggcctcaggacccagatgggggacaggcggagtgtcagtatcaaggaaagatgtccctgggaggaagggctgagtcttgacttcttaaagaggcactgcccagctaaacacttgggggtctgatgagtctccaggtcggactccctccccgccattgtgtcactgccaggggcacagataagcatcccccccgccccagtttggggaattttccaacacctcatggggagaaaaacaaggaaaaaccaacaagtgcaggtggagattattccatggtgctgctgacaacagtgggagggagacagtgcagctgacggggacctcaccctccaccagccttgaggacagggtgggtgggagctgacagtaatgttcgcctggatccaaatcaaagcctggaacgaccaagtaaccggcctgctgggtctgaaccacagccctctggccgcctttggccccactgagcccccgtgtcacagtgtcactgaagcgccttcccttgacgggtctgtgtttccaaatgaaaggtgtcagcaggaaagttcctggtgccttcagagtcgaccggttcaaggccagctcacgaatccactgtggagacttgcattggtgaggtctgtatgcacttaggaggcacgctgggctgtgaggcctgggagagctctcctgaaaggggactccgcagctccctctgtgtctgctgtcttagccctggacggggccaccttctagttctcgtatctgggtgggtcacacgggccagaatctggatgtctgtggccgatgcaaaatcaatagtggctgggaaacacactggctctgatttctgcttccctttggcattaccatggaaccgagacaccgtaggggcatgacaccaccctagccgaggcctgcccactcaggatggggttcattttcagaagcaaataagtggttcatttcagcagcctcttggaaatccgcagtttagacagctcggcacgctgggcgatgggatggccccgggaggcgcccggcacctgtcctcactggcgctccaaggtgtctgatggcacttccaccccaccatgtgcaggacatgcctagccacttcccattcattcatttaccgacaatgaaattgtatccaactccttcaataattcgaagcacggcctagctgatctggtatttgcactactcttaatgcgaacttccaaaagaaccgttccgctaacctagaaatgccacttcctaatacacacatttgcctgagacagaaaggcctgcttttaaagaaataccagagagggaagaggtttcccgggaacagccacacacgcaaataacccattgatggaaatttggggtttgtaaattagagggttctggagaggcaccgccggggcaccacctccacaagtgaggtgcgggtgacctgggcccccctgactgccagcatggactgggctgctcctgcacaggtaaaaacatgccctgaacagcagtctcagaacgtccacgctgaaagagtcacgctgccaatctgccgggcagtcagacagccctcttggcatttgctcagggaagtggaatcattcaaaccagaggaagcagctgtgccctcttctaagttagcacaaatagtcaagatccagtgaacccagaaaccaccagctgatcggctgagcccccgaatgccgtgaacatggagagacgtcatcttgagtccccagaggagagctggttatggatgattttagacaatgatacgacccaaggggacaaacaaaaacaattaagggtcctgtcttcactcaacccatcccttcagagtggctgaagtacactatctgatcatttcctctggaaaaaaactggggtatttgcagtgggaaaagtgattttaaacagaaaacaggccgggcacaggggctcatgcctgtaatcccaacactttgggagcctgaggcagaaggatcatttgagcccagagttcaaagaccagactgggtagtaaagtgagaccttgtctctatcagaacattttaaaattagccagatgtggtggtgcgcgcctgaggtcccagctacgtgggaggctgaggtgggacgattgcttgagcccaggaggtcaaggctgcagtgaagctgtgactgcaccactgcattctagcctgggcaacagagcgagactcatctccaaatatgtaaaaaccaaaaacttagggaaaaaaaaaaaaacagaaaacaacagggctgcatccaggcctgggtggaatttgctttcccaccaggagatgagggtgataaaatggctggcgctattttaaaactgaagttaacaattgttctggaactaccagaaatgctaagccaaatgataccttgaaaccttgggtgttttttttttttatgcttttcgaaaaaacgagccctttgcgggttggggtcacaggaaatagaattatgaatttcagaaagagaacagtcatttcttcaagctgccgttcaccccacttacctaactcttccctacccaagacagagtacctgagtcatgtgtgaagagttctgttttttttaaatcagcgtttaatatttttccaccagaaaataaatgaagggctattcaagaaactctagataaagcaggttttgtttctggcttttattaacaatgtcaccattttgtatagacccccagtgcgcatctagggtcaacaaaatcaaactcactgccgttgtaaaatatttataggtcaccaagagccagaaacaggtcagggtcttgggcgatttaaataagccacatgggccagtcacgtgtaaccccagtacttcaaggtgggaggatcgcttgaggccaggagttccagaccagcccaggcaacacagcaagaccctacctctacaaaaaaaaaaaattaaacattagccttgcgtggtgttgcacgcctgtcgtcccagctactcaggaggccaagacaggaggatcgcttgagcccaggaattcgaggttacaagtgagctctgatcgcgccaatgcagaccaggctgggcaacacagcgagaccctgtcactaaaataaataaattgacaaataagccataggatagctgtgcacggtagagattatcaagacggctcagaaacaaatcgggtgctttctgtgcattgacatggcagggctgtgttcaaagagccatcccaggagtcgaagcatctataaataacacatctcacacctaatgatgaaggaactaacaagcccaaaggaagaaagcgagggcatcacacatagtgaaaccaattctgggaagacaacacctgaagctttcagagaacaagattttcatgtatcaaggaagctgctaaaaactccttgaagcgacggcatgttacaatctggaatattttttcacacagagaaaaacaaagccaggctttcgaaatcccgagatttgcttccgaaaaggcacttaactttgctcaacagttttttggagctctttttgttttggctttcagagtggctgttctagactggatttcttttttcattggagctggtaactgaaatttaaaagcttt

SEQ ID NO: 18140 - DNA, 5488 bp, Homo sapiens
  CDS (4350)..(4736)
tccacctcttggtgggagagggtgcaaaaaattttatgatcattctcagtctaccacaagaaggttccagtgatcaagaaaggcttcatggagataccaagcattgagcaggacttcaaggatggataagatctgatgctgaaggaaggagaaggggtgatattccaggagggaaggacagtgtgaataaaggagcggaggtgggaaggaagtgtttgggaggccctgatctgaccagtcttgttgaggagagggtgcatgaggcaggctggtaggagatgagaaaaagagaattgggggtagatttaggggtcttgaaggctggcctgagaatttgataaatgacccaataggcaaaaggaggcacggaaggattgtaagtagggtcaggaggtaacattgaatgccattgcctacacccccatgtccccacctgaaagtaacatccttcgttgcgtggttttctaaacatcgggactcttcatggtttgatggctggccccagggtagttggcacttttcatttttctcccgttcctgccccaccaccatcaaaaggcttggacacctccatcatcgctgatgagtactgaatgttgggtccctgcggtccagagctgcctgcttctgccagagggaatgacagaagggaagtgactttcaaacaggagccggggtggggctgggcaaatgcacctggtccccttgcccacccactcctgcttctactctactctgggttcatcagttcatgccctgtcctggaggagaatttccaacatagtgacccccatgtggctaaaatggcagggaggggtgctaacatttattgaacattttcttgcatgaatctctctctctgagggtattcagttaggtctcaattctgcaaggttgctattacattatgaccactttgcagatgaggaaactgaggccagggaagttcatacagccagtcaatggcagcactggggttgaggccagctggtctgactctgcatcttggtcgcacgatgtcttttatctcattttctgtgtgagaacctcccaggacagcaccacaggctgatctgagatttaagagcagatctaaagtcacgcctaccttcggatgatactgaaaagccagagtcctggccaaaaagctggtcaggagggctgtgaggggccaggtgcacagtggggctctgacatgcctccccagtcccttcaggccctgtggtaaggctgaggtctcaggccatcactctgggggtctgaagatgagtcagagccagcctggggccctggcctcccagtgggtgagcaggaaggatttcactgcattgggaacattgtgtttccagatatagactggccacctgcctggccccctggatctctgggtggccgtccctggtgggcagtcaggagccaggccccacggggtgggtctgaggggcctttggatgacttcatctatcctcccccaccaagttagtatttctgtctgttctgtgaagtcctggtaactgaacaagccctttgggttcagattccttctcccactgaaagccgcatattgcagtaaatcctttttggccaagataaatgacagatggcccaggaggaagggcatcaggtgatagagacagagcagctagaagagtcagggagagaagaagatacaaaagaaattgtgcagcactcctttccttccacaaggcttgatgtgcccacactgcctccctgcaggacaggcatgggtgccatgtgtgagggtccacaggccaggccccctcttttagcctcagtttcccagttcacagggtggaggaggaatacgtgtttggaaccagtgacttccgggggccccctccggtggccttaaggtgacatcctcacccacctgggggcctgaggcaagcctgatagcttctacagtcctgcaggcccaaaagctaaccaagcagcagaacctttgcaaatgcagactctcagggcttatcctgcagggccccagtcagtggatctggggtggacccaggggcctttaattttagaaaatttgcagatgggtctgatattcactgtggcatagtatagatcaaggtcagctgtccccattcactgattcttagtcttgggtgcacattagaatcacctggagggctatagggaaaaattccaatgctcaggctacaccccagaccaattatatcgtaacctctgaaggtgaggcccagacagcagtaatgtttaaagttcctcaggtggttgcaataagcactgagactgagaaccattgctatggatgagccaaaaggtggaggcagcgtccaccatccatccttgcccgccctccttctgaaggtgaagctttcacctttggaaaccctgtcatccaccaggacagctaaaagcccgtcctctagcagctgatccctctgatggacaaggcattaaatgacaggttacataatcggggacctagtcctgggaccccggacaaggcacctgccttgcctgaacctcagtttcctcaactgtggaaggagggcatgggtgcctggttttcaaaacgtgctcagagcaggtctagctgtactgggcagtacctcggccaggagcactggactccgggcccccatgcccctggccctggttctcccagagcagctctaatcttagcctgttattgctgaagcctccttgtgctaagacaaacacttcaggagccaaaaacaatttgacaactgttagtctagatgatgtgcactttcatcccagctctgaaggtctacggaaaccccactctcccttctccacatatactcataattcctgtagtctggagccttcatttggcacctacaccccataaatcctgctttgatttgcctggcactgatgtggtcctgtatctggtttatctcccccactaagctgtgagttccttgaaggcaggtcttcattcattttataaacacagcacacatttattgagctccttctgccaccatgctggatgatggggacactgtggtgaatgagactgacacagcccctccctcatggagcaaaaacttcgtggatgagaaagattgagtgaagcaattacaaagttatatgtgctgtaacagggaagcatagggtgctatgggggcacaagggacggcacccaggaagatagagggggcaggaagcttcccagggacagggaaggaggccagccttggctgagggagccgcatctgcagagacctggagggtgagggaggggctaaggccatagacagggagcaggcctttgagccctgcctggtaaggagccagcattttatcctgggcccctgatgacgtaaccgtggggtggcctgaacagtttttcctgcctgtggaatcctcctctttgcctaccccacaccccttctccagcactggtgcaggagttgcatagtagtggctcaggagtcctggatgagagagatgcatctgggggcacagtaggggtgcacaggtgtggacggatgaggaggcaccttcacacgaatgggtgctcccagacaggggtgggtggtgcatgaatgttgaattgcgttgggtggtaggtgggatgtctgtgtttgaagcctgtcctgctccccacctaggttctatgaacaccctaacccaccctgacagcccttttcctggagtccagcccccagcttggcatagttggtgaagacccattgtctgcctatcgccaggcactcagagaaagcctctatcccccttctgtgggttcacgggctctctggggccacgctgcaggtggtggcttgccctgttgcctggccctcagctcaggcccttggagtgcctctctgccctgtctgctgccccggctgctcctcttaccctccctccctctctgcccgcttccggcccagtttctcagctacctcagtgcctgtgaccgcctgttacgtcagggatatgaggaaggcctggtggatgaggccatggagatgttccagttctccgagagccaggtcagcagggcttcctgccagggccccaggggatggaagggatgggggtgtacccaggagcccggtgtgcagggccacaccagtcctcagagccagtctgcgggtccagcctgtgggtctgtcgggagattgcctgactcctcagctctgaggaggagatggcccagggagctacagcagggacaaaggtgagaggcacagagggagatcaggaagaggtgggacggggacaggaggcagagagcagcaggggttttgctttattagacttaatcaacacagcctctgtgactgaatggccactctttgtcggacactcagataggagccatgggcagcacaaagatgcatgacctttctacttggggagcgtgccgcctaccccaagtgcatgcagctgtaggcccaatagtcacatcttgttttctgagactgagtctcactctattgcccaggctggagtgcaatggcacgatcttggctcactgcaacctctgcccccgaggttcaagcaattctcccgcctcggtctcccaagtagctgggattacaggcgcctgccaccacaccctgctaattttttttgtattttcagtagagacggagtttcaccatgttgaccaggctggtctcgaatgcctgatctcaggtgatccgcccgcctcggcctcccaaagtgctgggattacaggcgtgagccaccgcacccggccccagtagtcacttctaagtgccccatggcagagcagctcttcacagaggctgaaggggacggagggttgggtgaggcctcgagaaggagagagtgagcagaggtggggaagtttcaagccctggggtcggaggggaaggaaagtgcaggctgcgctgtgatacctccacagtgttcagggcacgggcagggaccttgggctgtttgtgctccaggtgcaggtgtacggtctgcccccctcctgccccagcagaaagttgacagtgagtgggaggagtgggaggagagtcaggacagagcccatggccaggctggggccttctttccttggcagaggaagggaggtcggaacctacatcaccctacaggtacagaaaagtggcaggtgcggcccaggatcaggctcacgtggcctgggggtagccacagctttttgggactaggtgcagtaggcactggagctggggctccccatggctgaggccaggcccagcagagcccccagcaccctccctgtctcctcttcctcaggcaggggagttcctgcgcctctgggagcagttcagtgacatgggcttccagcaggaccggatcaaggaggtgctgctggtccatggcaaccgccgagagcaagccctggaggagctggtggcctgtgcccagtgaccacggaggcactccacgatgcctgggcatctaggcccaatgccagacctggcaacccatcctaactgtattattaaaaccaagtaagagt

SEQ ID NO: 18141 - protein, 129 aa, Homo sapiens [sequence omitted]

SEQ ID NO: 18142 - DNA, 5463 bp, Homo sapiens
  CDS (2431)..(3042)
ttatcatccttcaagtggggctgaacaccattgcagacctttggtacctgttcggagacctcagtctttcattggtgagcacccaagggtttgctgtggaaatgtttttgctccctgatgttgctgagtaggagctggtggccttctctgtctctactgcaggtggcagagtggctgtgttctgggtcccaggtgggctggaccccccaacctccgcagacagcaggacatcagggagtgggcccggctgaggactggatagggttcaagggagaggatagattaacattcttggaagtctctttttgcatttgttttataatgtctgtcttttttttttttttttgagatagagtttcactctgttacccaggctggagtgcagtgggccgatcttggctcactgcaacttccgcctcctgggtacgagtgattcttttgcctcagcctcccaagtagctgggattacaggcacataccaccatgcccagctaatttttgtagttttagtagagatgcggttctaccatgttggccagattgttctcaaacccctgacctcaagtgatccgcccgccttggcctcccaaagtgcggggattacaggcatgagccaccgagcccggtctgaactcacaattttcatttcctgacccacggtctccatatttggaggccagtaagggcctttacagtttattatttattaagggctgattctacgccaggcactatgcgaaacgctttaccttcattatctcatttacccctcataatagtcctatgaggtagggagttattaccctgattttcaaatgaggaaatcaaaacctacagaggtaatgacttccccgaggccatcggggagtgagaggtgtatctaggagtcacaaccaggttaggttggccccaggccatcactctgctgtggtgctgctccatcacctccaaaccagctcctaacaagtttattcattcattcattcattcatttattcagaaaatgtgtaaagatcatccagccactgtgtgtgaggtgctggaatatacagatgaatataatatggtccccaccctctgtggtcaatggagagagagaaataaggaagcaggcagttacagtcagccaggagtgctgggagagcacagaaaagggcactcggccagtcccaggcaatccaggaaggcctctggaaggaagccgcgaagttaagataaggagccattagccatgtgatgggttgggctgggacagtagaggaagcactgggaaagttcaaggaggttagtgtacctggaacatggagcagactggtgagcaactgtgttgcagatgcaggtgccttgtccttggcacagtaacatcctggggttttgggtgtagagcctggagaggtagtagagggctggcccatgtttatcttgtgtagtgcttgggtggtgggtgttacagaaaggcttagggtttccacatattcttctctctcctcttggccattttttatgattatgactgatatattaaaagctatatataatgcatgcatagtgcctaaggaataatgaggtctcacatgcctagcaccccacgctggcctctgtttgcaggtgactgtgggaaaacacctgactgctcgtgtcctgtgcctcatagtgctgcccctggcactctatacagccacctttgctgttcacttcatggtgctgagtaaaagtggccctggtgacggtttcttcagttctgccttccaggcccggctttcagggaacaacctgcacaatgcttccatccctgaacacctggcctacggctctgtgatcactgtgaagaacctccggatggccatcggctatctgcactcccacaggcacctctaccccgagggcattggtgcccgtcagcagcaggtcaccacctatttgcacaaggactacagcaacctgtggattatcaagaaacataacacaaactcagatcccctagacccttccttcccagtggagtttgtaagacatggagacattattcgactagaacacaaagaaacttcccggaacttgcacagtcactatcatgaggcccccatgacccggaagcactatcaggtcaccggctatggcataaatggaacaggggactcaaatgatttctggcggattgaggtcgtaaacagaaaatttggaaaccggatcaaagtgccgagaagtcgaattcgcttcatccatttggtcacaggttgtgtcctgggctcctcgggaaaggttctgcccaagtgaggctgggagcagttggaagttacttgcaccccatacctgaaagaaaccctcaactccatctggaatgtggaggaccatatcaatcccaagttgccaaacatcagcctggatgtgctacagcccagttttcctgagatcttgctggaatcccacatggtcatgatccgggggaacagtggcctcaaacccaaggacaatgagttcacgtccaaaccctggcactggcctatcaactttcagggcctacgcttctcaggggtcaatgacacagatttccgagtctatctgcttggcaacccggtggtttggtggctgaatctgttgagcatcgccctctacctcctctcagggagcatcattgctgtagccatgcagagaggggcacggctgccagcggaggttgcagggttgtcccaggtcctgctgcgaggaggcggccaggtcctgctcggctggacactccattacttcccgtttttcctgatgggccgggtcctctacttccaccactacttcccagccatgctcttctcaagcatgttgacaggcattctgtgggacaccctcctgcggctctgtgcctggggcttggcctcatggcccctggcgaggggcatacatgtggcgggaatcctgagcctgctcctgggaactgcctacagcttctacctcttccaccctctggcttacgggatggttggtcccctggcccaggacccccaaagtccaatggcaggactaagatggctggactcatgggacttttgaggccactgcaaagattccagcctgggtccaggaacttcccaggagagccagctgggaagcagtactggaccatccggccatgaggaagctgcctaaggagcccgaagaattctgctgctcaccaggacccagctctgggagtgcagctggaatggaacccagcattggagagagccgggagagagccgcagctccgtccacagcaccacggagaggacagcgcctcttgggctgctccctcgtgcacagcgcaggggaggatgggtgccagagggtgggagtgggtgcgcgtgtgtgtatgtgagggcatgttgtccatatccctgtggaatacagaccgtgtaactggacagctgagtgtcataaactctaaaatagtccaggctatagtaatattttctggtatttttttctgttggatttctttggttttggtttgtaagatccatcaaaaattctcagacctctgagagggccttgagggcagagaatactgacctcaccttgggatgtcaccaaaggcagagcagatgggactgtcaaagttgtgctgccctccctcccacaaacaaatgaatccagcgtggaggaaggcgcgccgccccgagctggagggcctggctcccaccatgccccccagtggctgcaggtagctggacttcctgcctgtgacgcacagagagcagcggactccggagcgtcagcctgccttagcccttggttcctcgttttttggggttgtcacactgtgacactcgggaggaacgatgtcctatcctgggctgctcaatgttcccaggccctgtgtgccagaggccaggtctctccaagtgcatctagcctggcctggagggcaaggcagatgcattctcctggctgctgggagagcccatgggaaccttgcttagcgcccaaggtagatgagagacagggcagggaatctgcgtggtgctgggatgtggggactctggcctctccagactaatgttcctgtcacctgctgagctttcccagtgtcacttctgcagtcctcctctgctcacccctccctcactccatgggcaattccctttctctctgtcactgcttcagcagtgaagacccatggcacctagaaatgcatgccagcttcctgcatctaccactctgcagctcaaacaagaagctcagagctgccccttccacttcctccccaaaagggatgaagaaaaccctgtggtagaaccaaaccacccaaggccagcccttaagcctgcctccaccttcctggtgcatgacaaaatatttcttttgtctcagaggactttgatgcttcaatatttaatgatgaatccgccacactccattttccctcctctgaagctcccaacaactctgacagggtcagatctctttaaagcatcttcaggaggcggttgccacggagactggatattggtcccagggacaggctgtgctacctactgggtggtggggagggaagcttctggccatgcttggacattcagaccaaccatcattaatgttaatagaggaaatgcagcaacgtcaaaagcaaggcaggttggttaattagatctggggcccgatgacctccctttcccactgctacagcccttttgacttcccccagcaggaagtgctgtctgtgcggctgagtctgggccacttgcttaattgcatttctggcagggaaggagaggagggatggagaagctctgctcgctgcttccacctcaccatgtgtcctcccctcccctcccttcctctcctccccacaggcggaattgctttcttctgagccgggtgggctctcctgcagggagaatgcaggggtctgtgcttggctcttagcaaagcaggtggcccacagtgacctccaggaggtggctgattttcctttgtgccttcttatttctcagtaagaacttggaagggaagagctctgaaggagccagaggggcagtcaccttacatgagggtgaggaaggagaagcccagccagcctctacccatccctccctcccaattaggctgcactggggccgaacgcttccctgggctcccactgccttctaaggagccaaggagaattccctgcccactttctgttcctccatgcccaaactggcagatgcttctctgggagcaaggccacatgggctgatgcagctttgagtgctcaggttctgttttctggaagttgctggagaagggctgtcagggtgcttctatgaatatgggcttcagctgtagcacttggcagaaacgtgatgtgtcccacaaactgctggtggaggaagaagatgttcgtcagccaattcaacctccagccagcttcttgagcctatttggtttaaaaaaaaaaagtcttctaatcagaagccactgattttataataaataacacttgttttg

SEQ ID NO: 18143 - protein, 204 aa, Homo sapiens
MVMIRGNSGLKPKDNEFTSKPWHWPINFQGLRFSGVNDTDFRVYLLGNPVVWWLNLLSIALYLLSGSIIAVAMQRGARLPAEVAGLSQVLLRGGGQVLLGWTLHYFPFFLMGRVLYFHHYFPAMLFSSMLTGILWDTLLRLCAWGLASWPLARGIHVAGILSLLLGTAYSFYLFHPLAYGMVGPLAQDPQSPMAGLRWLDSWDF

SEQ ID NO: 18144 - DNA, 3874 bp, Homo sapiens
  CDS (495)..(1025)
aaaaaggtacaactaccttgctgatgctgtacatatggctcacttgtgcccagagagagaataaagccatgtcgaaactatctacgattccttgagtgtttttccagctacctgccacttgcccacccactcccctcagatctcagttagaacatgacaattgggctcatgaacaggatcctgagtggttgcaggtgaacaagcagttggcacaagggcaaagtgatcacatcctgattgagtggctatggacagccatacagactgtgtggaacaacgctggtgaaatacccaaaccatttagaagcagtaatgcctcacttgcctgggactgggatggtgtggctgagactgccttactggcagccaggtgcgctattcagcagccacaagccctacaagtaattaaccaggggcacctgtttgagctggaggtgcatgtggccacagacggttttggttgaggcttgtggcaatgcacagagcgcctaagaatgccagtaggcttttggtcccaactatggaaaggagctgaactccggtattcattgatagagaaacagctagcagctgtatatgctggccttcgggctcatgagagcatgacaggacaggctgcagtcatcatatggacaacttacccaataacaggatggatgcgtctatgtgtaatgaccacctggagtgggatagcacagatgtccactttggcaaaatggggcgactccttgcagcagtggagtaagctgagtacaagtcccatagcagcagagttgcaagaggtcttgggacgtgtagtcctaatgcaagataaggccatgcggcctgaggcacccctagatcctgagtcttcaccatttaaggaagggcatcccaggattcctgagggggcatggtacacagtagatgaggtgctactgctgcctggaccactgttgcagtccaacctagtactgacaccatatggtttgaaactgggtgcggacaaagtagccaatgggctgaactcagagcagtgtggatggtaatcaccaaggaggtgacacctgtggtaatctgtactgatagctgggcagtctactgaggcttaaccttgtggttaactacttggaaaatacagaattggctagtgagccacagacccatttgaggccaagccatatggcaagacctttggggaataggtcatcaaaaagaggtaactatttatcatgtgtcaggccatatgcctttggccacccctagtaatgatgaggcagatgccttggctaaggtcagatggtcagagtcagcaccaacacaagatgtgaccttgtggctacaccggaaactgggacatgcagggggtaaactgatgtaacaattcaataagtgttggggtctgtcccttcccaagcaagacatttgtgaggcttgtcagaaatgcctggcatgtgttcagacatatcctaaaaagaggcagctgcccggtgttatacaacaagtaacaatagggtgagtgcccttgaccaggtgggaagtagactacatcgggccgccgccaaagtcgcgagggtatacgcatgcactaacggctgtagacatggccacaggcctgttgttcacctacccttgcagggtggccaaccaacagaacaccatccaggccctgcaacacttatgttccctgtatggttgtcctctggccattgagagtgataggggaacacatttcactggacaacaggtacaatgatgggcacagcaaatggacataaagtggggattccatgtgccatacagcccacaagctgaggtattattgaatgatataatgggatcttgaagaatggattacgcttgcatgtcaaacccctgtctttgcggagctggagttccaggctggacctggtgctccaaaccttaaatgaatggccacagaaaggtggcccggccccagtggaggctttgtttcactaggccaccacccccattcaattggagatacataccaaggatgacctcctccgatcaggtatggggacaaatggtaacctgttgttgcctgccccaacaaccctgaaggcaggggaacagaaaacctggctgtggccatggaccctccaagctctccactgctggtggttggccatcatagctccctgtggggagggcctacagtatgacttgcatgtcactttttgagtgttcaatacatggcttccaaggttgactgtttgtagaggaacagccagggaaggaaccctcctctgagggacatatgtactatctgatgggcctattatgagctacgctgtgactttggcatggatacaggattctaaggaaccatggagatttgagaaggtgtggtaccatcacccagggcaaaagcccttggtggctgcattgttatccagggatggaaagttagcctatattttgcctgagggatgtgatttacctctgttagtacctgtgcctgctctgtcatttcaaccgtaggttaacatgctccaattgcattgtggactgaccccacacctatgctgaggtgaccaatgtttccaactgttggacctgcactgcctttccagcagcagctgcagacagcttgccccgacacatacatcccgtgtctgcagagaactggacatgcctggagacttgagatcccatggctgatgcctggaacacaatgtggcaagctttggacaaaggacacagcaagacccatggctggaccgtagcattcgtgatgagtggggctggctagtaggggaacatgtagtagcccaagcccaggcattgcagtgcacagagcaacattggggtaacaggatgggtacctgtcacggcctgtgcaaacataacatgtgtcaccacactgaaggtatggtagaacaagtggcctcaccaaggtcggaccccaatggactttttgcctcttgggagcttatgggtctatgaggacacagtagcctttcctatcagcaaactggagtggatgttgtatctgggggtggccttatgtacctgctactgttctccccacattgcccagatgcctgtataactgggaggcactgtgctctcagtttttgcgaatgtgatgagccccctggtgtttctaccctttggcaatgactatccctggagcaggtgtcaaaactgtagaagcacaatttactgctcttgcggagcacaccgctcaggctctgaattacacctgagtgtccctcctcctgttaatgaatgaggttgatcagatcaaaaagtggtgttgcaaaaccaagtggccttagacataactgctgcccaaggagccacctgtgcccttttaggaacacaatgttgtaccttatccctgacaatcagcagaacataacagcagccctgcaaaggggtcttccaggagattaaggtgactgagagcctcactgtcaaccccctgcagagatggtgagcatccctaggttctggcgtacattgggccctaatagtcataagtatcatagctgagatcctagtagtgagctgttgctctctgtattgttgttgtgggttatggactcagggctccgccatataggcatgtgtccctgcctggaggacgccctcagcctagggggtgtagtgtaagggaaatggctgtgctttagtcaggagtaggctgaggcagccttctggtgcagcatgactcagtgggtttggagtgcaagcacacaaccttgctcgttatgtaaccacaccacatgaggcccattaggtaacaactcacatgagctcgtgtttggctcagagccactattgtctgtaaaaggtataccttgctgatgctgcacatatggctcgcttgtgcccagagagagagtaaagccatgttgaaactgtc

SEQ ID NO: 18145 - protein, 177 aa, Homo sapiens [sequence omitted]

SEQ ID NO: 18146 - DNA, 4534 bp, Homo sapiens
  CDS (34)..(4305)
tttattcctggactgccagctccctctctgacgatgtccaacacaatgcctcggcccagtactccactagatggcgttagtactccaaagcctcttagtaaactccttggatcattggacgaggttgttctgttgtccccagttccagaactgagggattcttcaaaacttcatgattctctctataatgaggattgtactttccaacagcttggaacttacattcattctatcagagatcctgtccataacagagtcaccctggaactgagtaatggctccgtggttaggatcactattcctgaaattgccacctctgagttagtacaaacgtgtttgcaagcaattaagtttatcctgccaaaagaaatagcagttcagatgcttgtcaagtggtacaatgtccacagtgctccaggaggacccagttatcactcagagtggaatttatttgtgacttgtctcatgaacatgatgggttataacacagaccgcttagcatggactagaaattttgactttgaaggatcactttctcctgtcattgcgcccaaaaaagcaaggccttccgagactggatctgatgatgactgggaatatttactaaattcagactaccaccagaatgttgagtctcatcttttgaacagatctttatgtctgagtccttcagaagcttcacagatgaaggatgaggatttttcacagaatctcagtctggattcttctacacttctctttactcacatacctgcaatttttttcgttcttcaccttgtgtatgaggagcttaagttgaatactctaatgggagaaggaatttgttcacttgttgaacttctcgttcagttggcaagggacttaaaattggggccttatgtagatcattactatagagactacccaacgcttgtcagaactactggacaagtgtgcacaattgatccaggtcaaacaggatttatgcatcatccatcattttttacgtctgagccaccaagtatttatcagtgggtgagttcttgtctgaagggtgaaggaatgccaccttatccttacctccctggaatctgtgaaagaagcagacttgtagtcttgagtattgcactgtacatacttggtgatgagagcttggtttctgatgaatcctcacagtatttaaccagaataactatagccccccagaagttgcaagtagaacaagaggaaaacaggtttagtttcaggcattctacatctgtttctagtctagctgaaagattggttgtctggatgactaatgtaggattcactttaagagatttggaaactcttccctttggaattgctcttcccatcagagatgcaatttatcactgtcgtgagcagcctgcctcagactggccagaagctgtctgtctcttgattggacgtcaggatctttccaagcaggcctgcgaaggaaacttacccaaagggaagtctgtgctctcatcagatgttccttcaggaacagaaactgaggaggaagatgacggcatgaatgacatgaatcacgaggtcatgtcattaatatggagtgaagatttaagggtgcaggatgtgcgaaggcttcttcagagtgcgcatcctgtccgtgtcaacgtagtgcagtacccagagctcagtgaccacgagttcatcgaggaaaaggaaaacagattgctccaattgtgtcagcgaactatggctcttcctgtaggacgaggaatgtttaccttgttttcgtaccatcctgttccaacagagccattgcctattcctaaattgaatctgactgggcgtgcccctcctcggaacacaacagtagaccttaatagtggaaacatcgatgtgcctcccaacatgacaagctgggccagctttcataatggtgtggctgctggcctgaagatagctcctgcctcccagatcgactcagcttggattgtttacaataagcccaagcatgctgagttggccaatgagtatgctggctttctcatggctctgggtttgaatgggcaccttaccaagctggcgactctcaatatccatgactacttgaccaagggccatgaaatgacaagcattggactgctacttggtgtttctgctgcaaaactaggcaccatggatatgtctattactcggcttcttagcattcacattcctgctctcttacccccaacgtccacagagctggatgttcctcacaatgtccaagtggctgcagtggttggcattggccttgtatatcaagggacagctcacagacatactgcagaagtcctgttggctgagataggacggcctcctggtcctgaaatggaatactgcactgacagagagtcatactccttagctgctggcttggccctgggcatggtctgcttggggcatggcagcaatttgataggtatgtctgatctcaatgtgcctgagcagctctatcagtacatggttggaggacataggcgctttcaaacaggaatgcatagggagaaacataaatcaccaagttatcaaatcaaagaaggagataccataaatgtggatgtgacttgtccaggtgctactctagctttggctatgatctacttaaaaaccaataacagatctattgcagattggctccgagcccctgacaccatgtatttgttggactttgtgaagccagaatttctcttgcttaggacacttgctcgatgcctgattttgtgggatgatattttaccaaattccaagtgggttgacagcaatgttcctcaaattataagagaaaatagtatctctctcagtgaaatcgaattgccgtgctcagaggatttgaatttggaaactttgtcccaagcacatgtctacataattgcaggagcctgcttgtctctgggttttcgatttgctggctcagaaaacttatcagcatttaactgtttgcataaatttgccaaagattttatgacttatttgtccgcacctaatgcttctgttacaggtcctcataacctagaaacttgtctgagcgtggtgctgctgtctctcgccatggtcatggctggctcaggaaacctaaaggttttgcagctttgtcgcttcttacacatgaaaacgggtggtgaaatgaactatggttttcacttagcccaccacatggcccttggacttctatttttgggaggaggaaggtactctttgagcacatcaaattcttccattgccgctcttctctgtgccctttatccgcacttcccagctcacagcactgacaaccggtatcatctccaggctctccggcacctctatgtgctggccgcggagcccaggcttctagtgcctgtggatgtggacacaaacacgccctgctatgccctcttagaagttacctacaagggcactcagtggtatgaacaaaccaaagaagaattgatggctcctacccttcttccagaactccatcttttaaagcagattaaagtaaaaggcccaagatactgggaactgctcatagatttaagcaaaggaacacaacacttgaagtccatcctttccaaggatggggttttatatgttaaactccgggcgggtcagctctcctacaaagaagatccaatgggatggcaaagtttgttggctcagactgttgctaacaggaactctgaagcccgggctttcaagccagaaacaatctcagcattcacttctgatccagcacttctgtcatttgctgaatatttctgcaagccaactgtgaacatgggtcagaaacaggaaattctggatctcttttcttcagtactctatgaatgtgttacccaggagaccccagagatgttgcctgcatacatagcaatggatcaggctataagaagacttgggagaagagaaatgtctgagacttctgaactttggcagataaagttggtgttagagtttttcagctcccgaagccatcaggagcggctgcagaaccaccctaagcgggggctctttatgaactcggaattcctccctgttgtgaagtgcaccattgataataccctggaccagtggctacaagtcgggggtgatatgtgtgtgcacgcctacctcagcgggcagcccttggaggaatcacagctgagcatgctggcctgcttcctcgtctaccactctgtgccagctccacagcacctgccacctataggactagaagggagcacaagctttgctgaactgctcttcaaatttaagcagctaaaaatgccagtgcgagctttgctgagattggctcctttgcttcttggaaatccacagccaatggtgatgtgaccgtgtctggcggtgaacctaccctgaaacgtgacttctgcacaacaaacgtgaccaaacatcaaagctaaagcaatgtttataaagttttatggtataactagggggaaatgagctgcacaaacctcaatgtattttaaatctgttgctgtcatcattaacggtatatgacatataaaagcaagttaaaatttacttttgtaaataaagtttttggtttgtttcc

SEQ ID NO: 18147 - protein, 1424 aa, Homo sapiens [sequence omitted]

SEQ ID NO: 18148 - DNA, 5039 bp, Homo sapiens
  CDS (1445)..(4825)
aaacgattgaagttgaagaacaacaggaaggcaatgatgcagaggcccagaggcgtgagattgagctgcttcgccgtgagggagaattgccactggaagagctgctccgttcccttccccctcagctgttggaagggccttccagcccctctcaaaccccctcatctcatgatagtgacacccgagatgggcctgaagaaggtgctgaagaagagccccctcaggtgttggagataaagcccccaccctctgctgtcacacagcgcaacaaacagccttggcatccagatgaagatgatgaagagtttactgccaacgaagaggaagcggaggatgaagaggatactatagcagctgaggaacagttggaaggggaggtggatcatgccatggagctgagcgagttggctcgagaaggtgagctttccatggaggagctattgcagcagtatgcaggagcctatgccccaggctctgggagcagtgaagatgaggatgaagatgaggttgatgctaatagctctgactgtgaaccagaggggcccgtggaagcggaagagcctcctcaggaggatagtagcagtcagtcagactctgtggaggaccggagtgaggatgaggaagatgaacattcagaggaggtagaaacaagtggaagttcagcatcagaggaatctgagtctgaagagtctgaggatacccaatcacagagccaagcagatgaagaggaggaagatgatgattttggggtggagtacttgcttgccagggatgaagagcagagtgaggcagatgcaggcagtgggcctcctactccagggcccactactctaggtccgaagaaagaaattactgacattgctgcagcagctgaaagtctccagcccaagggttacacgctggccacgacccaggtaaagacgcccattcccctgcttctgcggggccagctccgggagtaccagcacattgggctagactggctggttaccatgtatgagaagaagcttaatggcattcttgctgatgagatggggcttgggaagaccatccagaccatctctctgcttgcccacttggcttgtgagaaaggtaactggggtccccatttaatcattgttcccaccagcgtgatgttgaactgggagatggagttgaaacgttggtgccccagctttaaatcctcacttactatggagcccagaaagagaggaagctcaagcggcagggctggaccaagcccaatgcctttcatgtgtgtatcacatcttacaagctggtgctgcaggaccaccaggccttccgtcgcaagaactggcgctatctcattctggatgaggcgcagaatatcaagaacttcaagtcacagcgctggcagtcactcctcaacttcaacagccagagacgcctgctcctgacaggaactcccttgcagaacagcctcatggagctgtggtccttgatgcactttttgatgccccatgtcttccagtctcatcgcgagttcaaggagtggttctctaatcccctaactggcatgattgagggcagccaagagtataatgaaggtctagtcaaacgcctccacaaggttttgaggccttttttactgcgccgagttaaggtggatgttgagaagcagatgcccaaaaagtacgagcatgttatccgctgcaggctctccaagcgtcaacgctgtctctatgatgacttcatggcacagaccacaactaaggagacactagccacaggccatttcatgagcgtcatcaacattttgatgcagctgagaaaagtttgcaatcatccaaatctgttcgaccctcgaccggttacctcccctttcatcaccccaggcatctgcttcagcaccgcctctctggtgctaagggccacggatgtccatcccctccagcggatagacatgggtcgatttgaccttattggcctggaaggtcgtgtctctcgatatgaggcagacacatttctgccccggcaccgcctctctcgccgggtactgttagaagtggctactgctcctgaccccccaccccggcccaagccagtcaagatgaaggtcaacaggatgctgcagccagtacctaagcaagaaggccggacagtggtggtggtgaacaacccacgggcgcccctgggccctgtcccagttcgacctcctccaggtcctgagctctcagcccagcccacccctggcccagtcccccaagtgctgccagcatcactgatggtttcagcctcacctgccgggcccccgcttattcctgcatctcggcctcctggccctgtcctcttgcctccactgcagcccaacagtggttctctcccccaggtgttgccatcccccctgggggtcctgagtgggacctcacggcctcccacgccaaccttgtccctaaagccaacaccacctgccccagttcgcctgagcccagccccacctccaggctcctctagcctgttgaagcccctgacagtgccaccaggctacaccttccctcctgctgctgtcaccaccacttctaccaccgcggcaactgctaccaccacagcagtgcctccgactcctgcaccacagcgcctcattctatctcccgatatgcaggctcgcctgccctcaggcgaagtggtcagcatcgggcagttagcctcactggcacaacgtccagtggctaatgcagggggaagcaaacctctcaccttccaaatccagggcaacaagctgactttgactggtgcccaggtgcgccagcttgctgtggggcagccccgcccgctgcaaaggaatgtggtgcacctcgtgtcagcaggggggcagcaccatctcatcagccagcctgcccatgtggccctcatccaggccgtggccccgacccctggccctacccctgtctctgtgctgccttcttcgacccccagcaccacccctgcccctactggcctcagccttccgcttgctgctaaccaggtgccaccaaccatggtgaataatacaggcgtggtgaagattgtagtgagacaagcccctcgggatggactgactcctgttcctccattggccccagcaccccggcctccgagctctgggcttccagctgtgttgaatccacgccccacgttaacccctggccggctacccacacctactctgggtactgctcgagcccccatgcccacacccactctggtgaggcctcttctcaagctggtccacagtccttcacctgaagtcagtgcttcagcccccggagctgcccccttgaccatctcttctcctctccacgtgccatcctcactccctgggccagcctcttctccaatgccaattcccaactcctctccccttgctagtcctgtgtcctctacagtctcagttccattgtcatcttcactccccatctctgtccccaccacacttcctgccccagcctcggctccactcaccatccccatctcagcccccttgactgtttctgcttcgggcccagctctgttgaccagtgtgactccaccattggcacctgttgtcccagcggctcctggacctccatccttggcaccatctggtgcttccccgtcagcatcagccttgactctaggtttggccacagctccatccctgtcttcatctcagacacctggtcaccctctgttgttggctcccacctcttcacatgttccagggttgaactcaaccgtggccccagcatgctcacctgtcctggtgccagcttcggctctggccagcccttttccgtcagcaccaaatccagctccagctcaggcttcccttctggctccagcatcttctgcatctcaggctctagccacccctctggctcctatggcggctccacagacagcaattctggctccttctccagctcctcctctggctcctcttccggtcctggcaccatcgccaggtgctgctcctgtcctggcttcatcacagactccggttccagttatggctccatcgtctactccaggaacctctttagcctcagcttcaccggtaccagctccaacccctgtgttggctccatcatcaactcaaactatgctaccagccccggttccgtcacctctcccgagcccggcttctacgcagacactggccctagccccagctttagcacccactcttggaggctcatctccatctcagacactctctttgggaacggggaacccccagggaccctttccaactcagacattgtcattaactccagcatcatccctggtaccaactccagcccagacactgtctttggcaccaggaccaccactgggtccaactcagacgctgtctctggctccagcaccccctctggctccagcttctccagtgggcccagccccagctcacacgctgactttggctccagcatcgtcatctgcttcactcctggccccagcttcagtgcagacactgaccttgagccctgccccagttcctaccctgggcccggccgcagctcagaccttggcgctggccccagcctccacacagtccccagcttcccaggcatcttcccttgtggtttcggcatctggtgccgctcccttgcctgtcaccatggtatcccggctgcctgtttccaaggatgagcctgacacactgacattgcgctctggtccccccagccctccctccactgctacctcgtttggtggcccccggcctcgacgccagccccccccaccacctcgttcccctttttatctggtaagttttacttcctcaagagggaacaggaagttgagtttctttggagtgttggtagggtggatggaacagtgatgtcacatttaacctggtgaattacaaagcttaatgttatggaccaagtacttgagtgacatttggacaagtcccttctcttccctgggcgtgtacctcatgatccgcctgcctcagcctcctgaagtgttaggattacaggggtgagccaccacgcccggcctcttttcccgttttttaacccgcacggtaataaatgggcagtaaaagg

SEQ ID NO: 18149 - protein, 1127 aa, Homo sapiens
MELWSLMHFLMPHVFQSHREFKEWFSNPLTGMIEGSQEYNEGLVKRLHKVLRPFLLRRVKVDVEKQMPKKYEHVIRCRLSKRQRCLYDDFMAQTTTKETLATGHFMSVINILMQLRKVCNHPNLFDPRPVTSPFITPGICFSTASLVLRATDVHPLQRIDMGRFDLIGLEGRVSRYEADTFLPRHRLSRRVLLEVATAPDPPPRPKPVKMKVNRMLQPVPKQEGRTVVVVNNPRAPLGPVPVRPPPGPELSAQPTPGPVPQVLPASLMVSASPAGPPLIPASRPPGPVLLPPLQPNSGSLPQVLPSPLGVLSGTSRPPTPTLSLKPTPPAPVRLSPAPPPGSSSLLKPLTVPPGYTFPPAAVTTTSTTAATATTTAVPPTPAPQRLILSPDMQARLPSGEVVSIGQLASLAQRPVANAGGSKPLTFQIQGNKLTLTGAQVRQLAVGQPRPLQRNVVHLVSAGGQHHLISQPAHVALIQAVAPTPGPTPVSVLPSSTPSTTPAPTGLSLPLAANQVPPTMVNNTGVVKIVVRQAPRDGLTPVPPLAPAPRPPSSGLPAVLNPRPTLTPGRLPTPTLGTARAPMPTPTLVRPLLKLVHSPSPEVSASAPGAAPLTISSPLHVPSSLPGPASSPMPIPNSSPLASPVSSTVSVPLSSSLPISVPTTLPAPASAPLTIPISAPLTVSASGPALLTSVTPPLAPVVPAAPGPPSLAPSGASPSASALTLGLATAPSLSSSQTPGHPLLLAPTSSHVPGLNSTVAPACSPVLVPASALASPFPSAPNPAPAQASLLAPASSASQALATPLAPMAAPQTAILAPSPAPPLAPLPVLAPSPGAAPVLASSQTPVPVMAPSSTPGTSLASASPVPAPTPVLAPSSTQTMLPAPVPSPLPSPASTQTLALAPALAPTLGGSSPSQTLSLGTGNPQGPFPTQTLSLTPASSLVPTPAQTLSLAPGPPLGPTQTLSLAPAPPLAPASPVGPAPAHTLTLAPASSSASLLAPASVQTLTLSPAPVPTLGPAAAQTLALAPASTQSPASQASSLVVSASGAAPLPVTMVSRLPVSKDEPDTLTLRSGPPSPPSTATSFGGPRPRRQPPPPPRSPFYLVSFTSSRGNRKLSFFGVLVGWMEQ

SEQ ID NO: 18150 - DNA, 4415 bp, Homo sapiens
agagaagcaacatctttaaggtactgagggcaggagaagttaatgtagaatactatgccagaaaaaataaattcccaaaagtggaagtgaaataaggacatttagagatgtacaaaagctgaccgaattcactaccagtcaacccacactacaagaaacatcaaatgagtcctccaagcagaaggaacccaataccagatgaaaatccagatctccacgaggaaatgaagaacaccagaaatggatcggccctttcttcaaataagagcagttggaataacaaagctgttcagttgtacccttggaatccactgaaatcctgggtagggaagctccagtaccaccaactggaaagactgggaatgcctaatagctggtactggccattgtcgtaggctttgtccactctgacaaactgaagatggggactcgactcaccttcgccagccacaggaggacctccagacgaggttaggtcgacttcccgataactttagatcctgaaacctcacgggatttttcttctcttccctttgatctctcttccgcttgctcaacaggacaggactcgctgcctttctttcccgtcagaaagggatcccttgcggacaggacctaagtgagtagctggtttcccctacttgtccttccgggcctgggtgtctcgggagctcaggctgacgggagacctaactaccggcgagtgagaccagcaggagcctggaggggcgcgcaccagggtggaggtttggtgccgggggttgagaacaacagtcaaaccctcttcttcccctggcaccacgcacctgccccccgggacgccgaacgaagtggtccctaaagctcctctgcaggcccaaccgaaacaggcctgaagctccaggatgggcgagaggatcctctttgagcgaaaccagccttctgcctggctggccctggtcaacaccctgggaagaggccgatttggcggacagaacggaagaaaagacctaaaggtagaatctcatgatgtcgagatgttaaaacactcaaattttaaggttcgactgtgagggggagatagggggtctcgagcaggatcgacccctgagccttcatctgcagagtcctgtgcaccagctcagaggacaggactatgtgcaccaatggttctcatcaggcggcaacttcaccctcacatgcctcccccatccctgctggtacacaagaccacgactaggggaagcccggagggagaatgttaacccctggcatctatctagtcagcagaggtgagggatgctgctaaacaccttacaatccaccggaggacacccgcccccaccgaccccgaagtagccattccctggaggtggggaaactcgcctgtagatcaatgcccacgcacttggcggacaggaaatcacgaattggccactaactggatcttggatctgaggaaaaaattccagcgtcagagggaactctcggagatttgcccagagcataaggaacgtactccttccctcagtgatggatcatcacatctgggggaaatcatagacaatttcttttgtagggcgaactctgctatacagtttatgatgtcagagtgaatactttctttgagttgcagtcagaaactgtagatttttaaaaatttaaaattcattattctctgtcagtatttcaaagtgtatacagaaagctattgcactgttcaggagatggcgcctaacattttggaaattcaaggtgatgaatgtccagataagactatctctcctggtacaaagtttgacaatgctgaacatttttaaaggttctttttgatatacaaagtgcaccaatgagtgctttttaattcttacaataattctgggtgaggtaggtatttttccaattcccattttatgcttcggtagccctttgtatttatacttcaaaacacttggctctcttgtaattatttaagaaattagttgtgattatttgtttaatgtgcaggagttacaaaaggcaagcgttagaacaagacagacctggttatgattcctggctctgaaagctgtacaccctgtgaccctagacaggtgttttaatgcctcgctgcctctgtttcttgctctgtaaaatgtgaacaataacagtattggcctcatgctttttttgggttttaaaagtaataatgtggacaaagatcagtggagtgcctggcatgctgaacccattccatgactgatagctatagttgttatgatttgtatcaatccattttcacactgctataaggaactacctgagactgggtaatctatgaagaaaagaggtttaattgactcacagttctgcatggctgggagtcctcaggaacttacaatcatggcagaaggggaagcaagacatttcttatatggcagcaggacagaaagagagagagtgaagggggaagtgccacacacttccaaacaaccatatcttgtggttaattaaaaagtactcattggtgtgccttgtatagaaaaaaatatacactcactatcatgagaacagcaaggagggagtctgcccccaaggttcaatcacctcccagtagacccctcccctgacatgtggggattacaattcaagatgagatttgggtggggaaacagagtcaaaccatatcgtgattgttctataataaagagatgcccacatgtgtttcatcagggacagtgctcattaaccagttgtcctgccgtaattattaatagtatcccctttgctttcaaaagtgtcctagtttacaaaaagtatagaaatggaggacagaatagtggttgcccaagattggaaaagggtaagggtaaagggtgcagaggtggatgtggttataaaaggcaacatgggagatcctcgtagtgaaggaaccgtttagtatctccactgtggtggtagatacccgaacctaaacatgtgaaaaattgcatgaaactaaacacacacaccaacaagtacaagttaagttaggaaaatccaaataagatttctacattgtatcaataggtatatcttgattatgatattgcaagatggtactattcaaggaaactgggtagaggctacatgagactcccctgtattatttcctataactccatgtgaatctacaaggatctcaggattaaggaagatatcctagtttggaagataaaaaatatatcccagtagtaatatccactgtcccaccagggcctgactaccttctataaaaagaagtgcctttgttcccctcaagttcctttatttggttttattcttcttcacagtacctacctccacttggcagattacatttattttttcatctttcaacagctatttactgaatgcctactagatgccaggcttgagatctagcaatgaacaagatctctgtgaaacttacattccaggaggagaaataaataataaaccaaaaatataatcagtaaattatttaatatgctgggaaacaatatgtgtaatggaagaaatatgtaaagtgatggattagggttctccagagaaacagaaccaacaattgactcatgtgattatggaggctgagaagtctcaagatcacagttggcaagcttgagacacaggagagcccatggtgtgtttctgatttgagtccaaaggcctgagaaccaggagagatgatggtgtgattacagttcaaaagctggcaggcttgaggcccaggaagagccagtgttgcagttcaattccaaaggcaggaaaaggctgatatcttagctgaagcaatcaggcagaaggagctctctcttactcatgggcaggtcagacttttggttctattcaggcctttaagtgattggatgaggatcatctactgtggaaagaaataagctttattcagtgtactgattcaaatgttaatctcatccaaaaccatgctcacagacacacccagcataatgtttgaccaagtatctgggcaccttgtggttcagtcaaattaacacatattaactaccttagcaagatgaaaagcagtgaatgcaggatggtggttgaaattttaaatacgttggttatatagtctcattgaaaaaggaacatttgagtgaagacttgaaggggtggtggaataaaccatttatttgcttattgcctgtctccctctatcagaatgaaagcttcatgaagcgagagacttaatttttatctgttatatccctagtgcctggtgcagggtaagtactcaaaaatatttgttgagtgaataagtaatgattgaggatggggactggtttgtatctggttatatctcttgtccttagcacagtacctggcacatcctaagccatccaaaagagttggttatatgattgtctttgaattctatgactgtttataatatacagtaaacttcactgaagacactg

SEQ ID NO: 18151 - DNA, 3921 bp, Homo sapiens
ataaatccccctttttgtgtctcagggcagacagaggttctggctgccttttacttgagtcatgggcgctccagagtggcagggtagtgtggtacagagagactcactgctccgtgtgtgtcctctggcacaccctccgctctggggccccactctcacctcgttcagttgacctgaaggagctccagcccactccagccccttcccacccatcatgccaggctataactccactggagcagtaggcggaccagctggaggccttctcagcagagcagagagctctcaaggagcagacagggggaggtgttggcaaggcagctgcaacaacaagttcaccccgctttggattttaaaaggatcgaaattcgaaatcctcttctggggttatgtgaggtgctgtggggtctttttccttcctcctttctttttggtaggcaagcaacataccaagttcctagaaaaggagaaaaacactgtggcagcccagagggccatagctaaagcgtgactcactcagagccgatcctactgacacacgtcccctccctccgtcccactctgccattgccccctcctgtcaggaccagactagggggtctgggactcccggggagccatgcaccccccacttgggtggtggtggcagggcaggggagtgttgccaaacctcaggaggacttggagctgcccgtgccacttcctgtggagagactccagtgcgcctgccgctcagccctgcagagcctcagctgtgcctgcccgtgccctggcagagggtgggaaagtcccaccagcagtgttgagttgaaagctcagccacactggcatgtgctctccggggcctgttgtcacaccatggcacctctcccctaccgcctccaagacagagtcttttcctaccaggtgtgccaaccatcggagatgagaggacaccagcttctactatttgccaggcattgggctaagtgccctccatgagattatcttatcttgctgaatcctaacccagttctggagtttggtgctgggatttcactgttgtacgcatgaggaaattgaggtttagcaagagattcacagagcaaggaagtggcagagccaggactaggaacctggctcccaaacccaccgtactttctcctgagctgtcctcctctcagcgtcttgagcctcagagacccacaggatgcatttgcagcttccgcggccatctctgaccaggggagaaaacccacagtgcctctgctctgtgggaaccttctggacaagaggcccgagcagccccatattcagggcagcggcactggagcttcagagctagagcagcccactccttgacgtgcaagtgaccctttgcagtgacccttcacctgtgcgatcaggctctagccgcctgcgggccaccagtcagactcctatggcagctgacagggcggacctgtataggcgctggagttggcgtttccgtggggaatccagaggacgggctggcctttgttttgcatcgagccctttgccagcagaattccccgagatcaccgagggctctcagagccgcctggatgcggctcccggggaaatccgccagcagccacacatgccctctgcctctgagagctgattgtagggagaggcagcccaaggcccccatggagctctccttcctgttgtcctcccagcttctccccctagcttctccacccagccagccgacacaggagcagggcagttgggtagagaggcatccttcctcactgcctgccccagtgggccaggaaacctttcccaggcctcttagacagggcctgcccaccctcccagcccccagtgtggtgtaaggtgtaagggtcctctcggggcacttccttttgtccacatgtgagttttctccaaaggatcagagcccaaagctgccctgccccacgcctttcagagggagggtctgtgatgttctagccagggcagagtcacaagtacgaggtaagggatgagtcagctttgatggaacagaaggaaaagtcattcggggcctggggccctgcccagggacacatctgggcatgaagcagctgtcagttgtgtgtgcagctctggggccctgcagacctggtcttggatcctgctcttctgctcaccagctgcatgaccttggccaagtcctttcacttccctgtgcctttgttgtatcatctgaaacaggaccatgagaaaatccccctcattggctactgtcagtttcttcctctgcagtggttgtggggccaagtgagaactgacatattccgtggttcggaggtggctcggggccagcccttgggtcaccttccaaggtggagtcactcacctctgctggacttccttttcctcatgtgtaaatgaggaaattgaactaaatctcaggtcactcccagtctagaatattacgtgaggctgtttttgagaaatctctgaaagttgttctaagccctaagctgtaccccgagattcagcccgggcagcaggtccagggatggcctgtgcaacactcagatacctgggagagaagccgatccctgctgggacagctcggctggtggccagaaaagtctggggcctgattcctctgctctgctccctggagagggggtcggggcagctgcttcaccctctgacgagaagcctacctcctactgttcaggattgggtgttggcccagtgaggtgtgtcctgcctgcgtgtcttgtgcctgttgctatagacactgaggtttgttcactctgtctcccactcctaggacacatcggataaccatcaccaacttctgcctcgggaagcatctggtgagcgagggggacctgctgaaggaccagagagggagccctgcctacatcagtcccgacgtgctcagcggtacgtgtgtgtgccagacattgggcctctaagctcaatacagccaggctctgtgacagtccattcagcaaatttgtgggcaggccctgggcaaggtgctggggcttcactgggggcccagaccagtactgtccctccccatacaaaatgtttggtctgttggaggtggaagacgtaatgataacatgaatgcatgtttaattcctctgaggttagtgctagggaggaacgggattgctgtgagagtggatgaagggtgcttggaggactttccccacaaggtgtgacagttgagctatgatcttaagggaaactaggaattccctgggtatgtgtgactaggctgaggctgagggtcccagaggcagcacagcacgttggagcaattgcaggctgctcagaaagtgagcctggttcaaggggaagccagagaggtgcgcaggggccagatcaggcaaggcctgacataggcctcagtaagagatgtcatcctttacttcaagtgcgagtggaagccattgaacagttcttaactgagtgtgctgctgtgagtttgtgtttcagagccctctctccttgtctgtgttcattcattctgttactgtttgctgagggccacccaggcccaaagctctgttctagacactttggagacaacagggaacaaagtagacaaacattgctgccttcatggagctgactttctagtggggatgagacagataatacacgaaacaaataagtaactcacaggccgggtgcagtggctcatgcctgtaatcccaacactttgggaggctgtggcgggatcataaggtcaggagttcgagaccagcctggccaatatggtgaaaccctgtctctactaaaaatacagaaattagccgggcgtggtggcggttgcctgtaatccaagctactcgggaggctaaggcaggagaatcgcttgaacccaggaggtggaggttgcagtgagccgagattgtgccactgcactccagcctgggcaacagggcgagactccatctc

SEQ ID NO: 18152 - DNA, 4476 bp, Homo sapiens
cggatgggacagggagaggaagcagctgtgctttcatgctgaccctgatcctctgtgggggggcgtctccaaactggttgctgaaattggggatctgaaaaacatcttaagctatcctacagcaaaagttgatgattctaatgttagcaatcctgtctataggaataacggggttgtgaatcaatttgtaaacagtctttggaccctaaagtcagaaatcctatctacaggaacaactgggatacacaaggtcaggatcttgtgctgtgtgactttcagcaacaaggaagtgggccaaagtgcagcccaattaatgcttaattataactctatttcagtccataatgtggcatgcaattcttgtcaaccctctggggacacttttgaatttgggcatttgggaaatgttccttcattcaccagttgctgtttttaactaagtgatttactttgtgctggagctgagctgcgccaagctggagacacaaatagaacaaacacactccctgctctcatggagctcctggcattgtcccgtgcactagtgaccatttgctgcacacccagctcttctctaagcacttttcaaggatgctcttgtttaatcctcatgacaaccttatgaggcagatactgttattctcctcaggtgaggaaaccgaggcacagggagattaaataacttggccaaggtcactccatctgagccgggattccaacccaagtagtcttgctgcagagtcctagctattcaggacagtgctttgcacgggagagatttttgcccatagctctagggggatagaaagccacaggaacattatggctgaagtgcataattttggttggaaggaaacctctttgtagaaagaacagtataaggtaatgaggcaggtttccctaggccaggtaggcagtcagccccgctcctgctagctcctgtcaactctgcaagtcaggggagggtggcacccagaatggaagtactgtgcaaaagttttcaccagattctctcattaatcttcaccaagaagaccagcgatgctcaaactatctgtgcattcaaatcattgggcaggcttttaaaactccatgtcctgaccacaccctatgccaattaaatcagagtctctgatggtgggattcgggcttcatgattttttaaagctctcaatgtagttgcccaatggtttcttcttgcctgctgcccaggaaagcaaattcacagagaacagcaggttttgcagcaaagaaagagtttaataatcacaaggccagccaagccagaggatgggagagaattctcaagtcaaccttcttgagaatttagaggttagaatttttcaaggatagtttgtcaggctagggaatggggaatgctgattggttgggttggggataaagtcatagggggttgaagctgtcttcttgcactgagtcagttcctgggttgggggtcacaagatcagctgagccagtttcttggtatggttactggttgatatggtttggctgtgtccccacccaaatctcatcttgaattgtagctcccataattcccatgtgttgtgggagggacccagtgggagataattgaatcatgggggtggtttcccccatacctttctcgtggtaatgaataagtctcacgagatctgatggttttataaagggtttcccctttcacctggctctcattctgtcttgcctgctaccatgtaagacatgcctttcaccttctgccatgattgtgagtccattaaacctctttttctttataagttacccagcctctggtatgtctttatcagcagcctaaaaatggactaatataccggtccaggtggtgccagctggtttatcagaatgcagagtctgaaagatacctgaaagatacctcaaacaccaatcatacgttttacagttgtgatgttatctgtaggagcagttggggaggttaggaatcttgtgatccctggctacatgacttccaaagcataattctaaccttgtggctaacttgttagttttacaaaggtggtccctgagcaaggagggaaatagttttgggaaggggctggtattgtctttgttttaaggttgaagtataaacaaattcctcccatagttagcttggcttatgctcaagaatcatcaaggacagcttgtgaggctagaagcaagatggagtcagctatgtcagatttctctgcctgtcataacttttgcagaggcagttttatccagatgattccagtgtgcaaactagatagaaccactgagctaggccagaacttctgatgaacccttctgccccaggtgtgcaccaccaattctgaggcagggaacacaggcacatgagaggggacagcaaaattgtcattctttcctgaggctcttcccagagcaccttaaccaaagcagaggaactaagagaggcctgagagcagcctgtgggaaggcataggccttccagtggccggagtgcagaaggaaggaggagggtgcaggaggcggggaggataaatgtcaggcatgggcccagccgtttcagctgcttatttggctgtctccagagtggccagtaagaagactgagtcatttttgcaaagaattgttatgatctggctttgattgcatgtcagatatgcgtgcaggggactctttggagggaaaggctgtggtgggtggccccctcaatgcccattagcccacccttgctggccaacctggggcacagaggaggaatgaaagccaaaggtttttctcctttgcttttctttccctgcagctcatacttaaggacagaaaaatgtctctaggtttattggtagattcttaaaacatcccgtgcttcccatcctattgatgggggtgcccgccatacttcctgcacctcactagccccctcctccctggagagcaccgatggtcccaccccacagatcatgaggtggaaggacggtcttaaagatgaaaggttgtggttcagagatgtgaaggggcttgcctgagggtgcacagctttaaatggcagtgccaaaattagggtctgtgtccctggccctgttcaccctgccaaatggcccatcgtcagcaggagactcagaactccagtccacccagctttttctgcaggctagaactcagcctgcaggattgtcaaggctgtgcagtgtgctcctggctctctgagggctggagctgttctatttccatttgctcctgccccacctctgccaggatgcccagtccaggaccatgtggcagtagggaaggctcagcccctgtccccgcctgactccacccagaagggtgtggtggagtggtctgagagatgtgtgtgtgtggctccggagccttcttgttgcagcatgaccccctgtccctgccaggttaccacagtctgcttgcttgtctcttgtggcattttgagagggggtatgcagcttagcgcagcacagcaaggcgtccttgatcttggttgtttttgtgtccaggcaccagagctgccttgaggctgagatgtgggcctagggctggcctggattctctagcaatgctggaatcagaggccagctagcaattctggttacctctatgctaggtgctcacctcccttgacacttccccaggtcctgacccctccttctcacagggtcccactgtgggcaccacactggaccaggaaagcattctggagccatcgtttgtaatcatcctgcttctcagccggttccactgatgtaaaacaagtttacctgtcaatattgctaacaattagtgagacgggggcaagctgacctcagggaagtaattttgtgtaaacactgcccactctgcttctactattattgattactctaaacttcccacagacataggtgggagtccagggtggctgtctacagtgggaggagggccagccagtgcatagtttaattctgcttgaggtttttgccttgccataggccactgagtccttgactttagtcctcacctaagacatgaggccttgcaacagaagcccacacacttgagggccatgggaaagttaaagggacattcctctggcttcataaaaggattctagaacctcacatcctacattctacagtcataggctcaaagagatagaagtaaccccagaatgccctgtagactcaaagcctctcattatctggaatagtggaatgttggaggccgagtgcagtggctcatgcctgtaatcccagcactttgggaggccgaggcaggtggatcacttgaggtcaggagttcgagaccagcctggccattatggtgaaatcccatctctactaaaaatgcaaaaattagctgggtgtggtggcgtgcacctgtaatcccagggaggctgaggcaggagaatcacttgaacccaggaggtggaggttgcagtgagctgagatcgcgccattgcaccccagcctgggcaacagagcaagactctgtctc

SEQ ID NO: 18153 - DNA, 3746 bp, Homo sapiens
ggttggcagtggtcacgtcgcttgtcaaggcacccaggagtggggcccgagtggggatttcaggacgtgggctctcagggggagggaaagtggctaaccaggacttttgcaataccaaaatcagccacgcggtgtcatcctcctcccaagaggtctggctggggcttgcgggcagtttagggttggagccaggggagaagtcacagaagaattgctagaggtgaagttttgcattttgtttgcgtaacagccccacaccctgccctgcgaagatgcataaattagcccctggcccttccccacggttccttccttccctagtgtcttcccgtcactccagggactcccaatatggtgatacgaggcagcctgggggtgggggcagaaggaagtcctgccaacattcactgtgtgaccttgggcatttctctggctgcagtctccggtggccctcacattcgatggctctaggttccccagctgacctggcctgagggcttgggttgaggagaggatttgaccccatgtgaacagaaggctcccagggtgagtaagacatggccctggtttcacctagatctcagcctggccctgctggtgtgaaccggaggggagggtgagtggacagactggtttggcagctctggctgggctctggagggtggggagtttggtgggaagaaagccagggctacactgtagcaggaccagcaggtgtcaggactgggacatggaaggtgcaggggccaggcccagatagggagaagggaggaagactcctgactctataggtcatgtgtgcagcctcagcaaagggactgggatctccaggcctgggaggaggctggggctactgggttcactggtgggagatgcaggagtgaagccactgtctgtgctttggagtcaggagctcatgatggcatgaggttgatagttcccctcatccatccattcacccacccaaccagggccacccgatatggttgtatgggtttttccctggctgagggggcatgtgtggaccaaactccagctcatgtctgttcactgagcctgactcagtgggtttactctgctcccagccttcaagtcttggctacaacatggcaactctcttgatgagtggctctgggtgataggtggggtggggcgcatggaatgtcaaggccctggattcccagtctccatgggacttgcaacattgaagaaagttctgctggaggcagggggcagtgaggaagctcttttagatctggagacactggggcgtttggcctgtctccccttggttgcctggacctatagcttgggccgcccttccgttttcctccctcttgcatttcccatttgatgtaatatggccaaaagaggtgggaaagagaggaaaggaacctggggtctggtcctggttttggaagactcaaagatgaataaggcagataggaaactaagagggtggacatgcgggcgtcatagatgtacaggcaaaggggttcctccggacctgtgaactcctgtgaactcctgcatatgaaccctgtcctgggtctctggggggctgctgtgaggagcattgaggttctgtgtgcctgtaagatgggtcctcatgctagggatgaaggctctgtgtgaaagatgcagagacagatgagacaatggcaggagaacaggtgcaggggcgttgttagtggcccaggctctacttctggccctgcttctcacaacctctgtgatcttggataaatcaattaataactcaggcctcagtttcctcatctatgattaacagggctggaccaagaatacttgctgaggccctgacagtggggagggcctggaaaactccctggttggagtctgcagaggtaggatagcttcccccacgcgggctgctgctcacctcctccgcgctgcgtgcagccatctggcaatcatgaactgagctgtcctctgggtcagatgctgtgccaggtcctggtgctgagagccagccccttacctgggaagacagacacagtcagacaatcatggagcacggtaccaaagctgacacaggtacgtgcgtgcgtgcgtgtgtgtgtgtgtgtgtgtgtgtatgtggagggccgtttctgactcagtagagatgttcttgtcaggcttcagcagggaaggcatgtgcaggttgggtcttgagggatgtgtaggagttcctcagtccaaatagtcggcttcccacaggtctctagggaagtgctctatgggagtccatgtgcacaggaggccccagagggaggctatgtggactccgagctttgctcaagggctctacctcccaccaggccgaaacccacaggaagataccaggatggcagctcagcagcccgagggctgccatcagggcctgatctggggcccagacttggataaaacttcacttctcaatgcctctggtgagcctgaaatgggggtcagtcacctgcagtttccttagggcaggatgcacctggaaagacgatccgtcctttaacaggacaagcctgtgcagaagccggcacccactggatttggggaaaccttgtttctaggaactctttccccctgttacttcactggggaacctagcttctgccctgtgtctgagggcctccttggagccaccagaggtagcctggtagggtgggaagaccctgggtttctagccctagcttgctattaatacaacctggctgtgtgaccccaggtgagatgcttaacctctctgggtctggctttcccttttccctaaatgaggaggtgggattatttaatgagattagaggctctaaactgtgttctgaaggagctgtaaggtttttggaggagctttaggggccaaagagggtaagaaagagatgaatccaagggaatcttaaggggtcagggctctgggacccctgcccacctcagtcagaggagctgtggttttaggagttaaatccatcaggaggcaggatcctgtggtgatcccgtccttgacttagatgttctgattcaaatccccactctgacccttactagtaagaacttgggctgattgcttccccctctaagcctcagtttccttaattttaagatgggacaaaagccgggcacagtggctcccgtctgtaatcccagcacttcgggaggctgaggtgggcggatcatctgaggttgggaatttgagaccagcctgaccaacatggagaaaccccatctctactaaaaaagaataccaaattacccgggcatggtggtgcgtgcctgtaatcccagctacttgggaggctgaggcaggagaattgcttgaacctgggaggcggaggttgtggtgagccgagattgcgccattgcaccccagcctgggcaacaagagtgaaactccatctcaaaaaaaataaaataaaataaataaataaaaaataaatgggacaaacagcagtacctccctcatcaggtactgtgggattaactgagattatatatatatatatgctgggctccaaacagagcctgatatatagcaagcattcagtgaatcttaaccagcatcattgtgattccacacaggagcccatctgcttgaggaatttagctgtaaaaataaaagtttgaacactactggatgggatgatctagaacagggtgtccaatcttttggcttccctgtggcaccttgggaaaagaagaattgtcttgggtcacacataaagtacactaacactaaccatagcagatgagct

SEQ ID NO: 18154 - DNA, 5243 bp, Homo sapiens
  CDS (437)..(2803)
aggcgttaacgcgcacgcgcttagggatccggccgtggccgagcgcgcggccgtaagaccgcgggtgactagcatgcagatacccatgctctgactttctgcccctccactgacatggcccaccggggtggggagagggacttccagacttcagctcgacgcatgggcacctcgctgctcttccagctttcagtgcatgaacgggagctggacctggtttttctggatcatagctatgccaagccttggagtgcccacccagatgccagtagtgcccgccccacccgcatgctctttgtcactccccggcggcagcacgaaagtaccatatgattgttaaatacctgtgaagtatgtgtggcccggtcctatttcctcacctgtttacagtgaatcagacgtcccaatagatgtggagacggtcacatcaacgcctatgccactctatgacaatcagaaggcacgcagcgtgatgaatgagtgtgaacggcatgtcatctttgccaggactgatgcagatgcccctcctccaccagaggactgggaggagcatgtcaacaggactggctggacaatggcccagaacaagctattcaacaagatcctcaaagccctgcagtctgaccggcttgcccgcttggccaacgaaggggcttgtaatgagccagtgctgcgccgtgttgctgtggacaagtgtgcaaggagagtgcggcaggctctggcaagtgtgagctgggataccaagctgatccagtggctgcacaccacccttgtggagaccttgagtctgcccatgctggcagcctacctggatgctttgcagacgctgaaggggaagatcccaaccttgattgaccggatgcttgtgtcatccaacacaaagactggggctgcaggagctgaggccttgtctctcctactgaagaggccctgggaccctgctgtgggtgtgctttctcataacaaaccaagcaaactccctggctctccgctgattctcatcgcctcctctggtccctccagctctgtgtttcccacttcacgccgccaccgcttctggcaatctcagctgtcctgcttgggcaaggtcatccctgtagccacccatctgctgaacaatggcagtggggtaggagttctacagtgtctcgagcatatgattggggcagtgagaagcaaagtgctggagattcacagccatttcccacacaaacccattatcttgattggctggaacacaggagctttggtggcctgtcatgtgtcagtaatggagtatgtcactgcagttgtctgccttgggtttcctctgcttactgtggatggccccagaggggatgtagatgatcccctcttggatatgaagactccagtcctctttgtcattggtcagaattcccttcaatgtcaccctgaagccatggaggacttccgggagaagattcgagctgagaacagcttggtggtggttgggggagctgatgacaatctcagaataagcaaagcaaagaagaaatcagaagggttgactcagagcatggtggacagatgtattcaggatgagattgtggactttctgactggagtgctcactcgtgctgagggtcacatgggctctgaacctcgggatcaggatgctgagaagaagaagaagccccgcgatgtggcccgcagagacttggcctttgaagtccctgagcggggcagtcgacctgcctccccagctgccaagctgcccgcctcaccctcaggctcagaggatctctccagtgtgtccagcagccccacctccagtcccaagaccaaagtgaccacagtgacctctgcccagaagtccagtcagattggaagttctcagctgctgaagagacatgtgcagcggacagaagctgtgctgacccacaaacaagctcaagttcccatttcatcagaaccaccagaggaaggagagaaagaggatcttagggttcagctgaagcgacaccatccctcgagtccccttcctggcagtaagatctccaaacgaccgaagatcaaggtgtcccttatctcccaaggggacacagctggagggtcttgtgctccttcccaaggatgtgctccagaaggtgggaagcccatcaccatgacactggggcaggcttcagcaggggccaaggagctcacaggacttctcaccacagccaagtccagttcttctgaaggtggagtctcagccagcccagtcccttcagtggtctccagcagcactgcacccagtgccttgcacacactgcagagccgcctggtggccacatctcctggcagctccctcccaggggccacatcagccagcagcctcctccaaggcctcagcttcagcttgcaggatatcagcagcaagacctctggccttccagcaaatccctccccaggaccagccccacaggccaccagtgtgaagttgcccacccccatgcagagcctgggtgccatcaccacgggcaccagcaccattgtccgtaccattcctgtggccaccactctctcctccttgggtgccactcctggtgggaagcccacagccatccaccagctgctgaccaatgggggcctcgctaagttggcaagcagcctccctggcctggctcagatctctaaccaagcatcaggcttgaaggtccccaccaccattactctgacacttcgtggccagccgagcaggatcactacactgagccctatgggctcaggagcagccccatccgaggagtcctcttcccaggtgctgccctccagctcacagcgcctgcctccagcaccctgaagatgctgtgtgatatgtcctccttaccaagttggtgatggctgcctcatggtgggccctggacaggtgtgtggtcctgctgagctgtccacgtgtcggaagacctgtttaagacagtcatttttgcctctccgccaactgtcttcagagaaaccattaggttaggtgatacggtgccagcaagggaagcaccatcgtccaggatctgcaaatctggttcctgggaaccccagactcctcagcagatctggctgtacatggatcagaaccacttcttcccccgcttaagctgtggtttgacccaagggtcagcatataggactgcctgctgcatttaatgaaggtgtttccttttggaagtctgtgctaccctctgcgcctagttgggaggagacatccatctggtctgggatttcgggagttagaatggaaagctctttgctaaagactggagtcatcctggcctgccaactggtggttcagagccggacgggcttgttttggacatcgctgttgccttcactcagcagccacgggagagtgctccccatgcaactccaccttagaaaccacgtcagatactgagtagcttgctgactcctggaaacttctggtttttgttagtatcataatgaaggcaaagagaactaggctgtcatctttcagcctctttgacttactctagatgttgggagcagtggttgccaggtgaaacctgggccctttgtctttttcaccatgctttgggcagtttctgtatccagagagtccgcaggttcagataagctgaagaagagtaatagaacagcaaaggaagtggcttgaaggatgtgctagtaagccctgtggtttgtgcttaggtctctgctctgctacccaaggaactggtggttcagctggagataaaaagaagaatttgccaagtcagagaagaaaccccaaccccggaaaatcctctgtctccagtctctggaggtgaagcagggacaataagctaaggtagtatcttggccatcccaggaaacttgtggcattaggacgatgaaggccatgcttcagtgttttcgtttctatttcatgagactttttgtcttcctgcttacaagtgggaagatgattgacagtgactctactatgcagggctgttggtaccaacctgagccctataggtggcagtccctggagaagtggtcacagaagatggagctctgatcccctgcttacctcttcacaacacttgtgtgcaaagatagttttagatttggtttagaagctatcctccagaacaggctcccatacttagaatgtttctagttaaggtaataaattaggcaacccaagtgtgactccactcaagtgtccttttctgtaggcaggaagggcccacaacatggcttaaaatgtagtccatggttctggcccacagtacagtgtgtatctataccaggtcacctgtgttcaatctgggagccttcctggccagtctgagtggcagccagaagggagctcatagtgtctaggagtctcaggcaaggtaggtcagggtactgtgggcaggggggatgtgtgtgataggagagggtaccctaaaccccataccttccctccctgacctgaaaagctgatctcaacagggattcacacagaattaggctgtgtttttgcattagctggtaggtgactttctcaaaattcttaaattcagaaagtatttagtaaacttgaggaaggtatgaaatctggaggaggcatccaggacccaggggtttgatagctttacaggtaggatcataccacaccaaaagagcagtggacaataagactatatgagctatatgaagcttttaggaatcatttaggacagacagagccctaaacaacccattcatgacttaagttgttggctcagtgtatgctggggacaaagaaaaactaacaagccgacctgcctttatgataaattctagtgtgcttacaagggatgacttcctgaggtgtgatctgtccaccttgaagaactccacaactgaagaaggggagctgtgagaacgtggattgttctacaacttgcacagggtaacagaggaagtggctgaggcctagagtcacgttttccagttcccttcgcaaactatatttcttggaacgcgaaaggaagctttacctatttcatagaagacctggaatccataacctcagaaggcaatattattgatagaaaatgtggaaggatcaggaagttcttagattcttggatgacagatgcatgttgatgccctatggagatgtccttgtgttttgaggtcactgaggtaggaagacctgtctactcttggtttcaccactagaacagtcttgggctggatgggttatagagctgagcggctgtgatggttctgtttttacattaacaaaaacaattaaaaacaccaaaaac

SEQ ID NO: 18155 - protein, 789 aa, Homo sapiens
MPLYDNQKARSVMNECERHVIFARTDADAPPPPEDWEEHVNRTGWTMAQNKLFNKILKALQSDRLARLANEGACNEPVLRRVAVDKCARRVRQALASVSWDTKLIQWLHTTLVETLSLPMLAAYLDALQTLKGKIPTLIDRMLVSSNTKTGAAGAEALSLLLKRPWDPAVGVLSHNKPSKLPGSPLILIASSGPSSSVFPTSRRHRFWQSQLSCLGKVIPVATHLLNNGSGVGVLQCLEHMIGAVRSKVLEIHSHFPHKPIILIGWNTGALVACHVSVMEYVTAVVCLGFPLLTVDGPRGDVDDPLLDMKTPVLFVIGQNSLQCHPEAMEDFREKIRAENSLVVVGGADDNLRISKAKKKSEGLTQSMVDRCIQDEIVDFLTGVLTRAEGHMGSEPRDQDAEKKKKPRDVARRDLAFEVPERGSRPASPAAKLPASPSGSEDLSSVSSSPTSSPKTKVTTVTSAQKSSQIGSSQLLKRHVQRTEAVLTHKQAQVPISSEPPEEGEKEDLRVQLKRHHPSSPLPGSKISKRPKIKVSLISQGDTAGGSCAPSQGCAPEGGKPITMTLGQASAGAKELTGLLTTAKSSSSEGGVSASPVPSVVSSSTAPSALHTLQSRLVATSPGSSLPGATSASSLLQGLSFSLQDISSKTSGLPANPSPGPAPQATSVKLPTPMQSLGAITTGTSTIVRTIPVATTLSSLGATPGGKPTAIHQLLTNGGLAKLASSLPGLAQISNQASGLKVPTTITLTLRGQPSRITTLSPMGSGAAPSEESSSQVLPSSSQRLPPAP

SEQ ID NO: 18156 - DNA, 3904 bp, Homo sapiens
taatacatgccctccttgccaattgttttctctagttcaatttatttttctttctttctttctttcttccttccttctttccttccttccttccttcctttctttttttctttttttttttttcggggtctggctctgtggcccaggctggagtgcagtgccatgatctcggcttactgcagccttacctcccaggctcaattaattctcccacctcagcctcctgagtagctgggattacaggtgtgcgccaccatgcccggctaatttttgtatttttagtagaggcagggtttcaccatgttggccaggctggtcttgaactcctgatctcaggtgatctgccctcctctacctcccaaagtgctgggattataggcgtgagccaccacacctggcccagttctatacttttctgtaaaaagtaaacaagttgcccaaatccttgtctctactttcagctgggaaactggcctgggcagctcaaaccattagatctggagagggagagggtgctgagtctgctcagtgatgtggcagtagtggatcaaaaatatctgtttggaggtcagacaggcctagattcactgctgtgcaattttgagtaagttccttgacttcccttgacttctctgatcctcatttttcttatctgaaaaatgcagcaaatagaatgatagaattattgtgagaacccaaacccagtagagtgctaggacagtgccagtcacatagtatgggctgtggtactagcagatgcagtcattgcctttagtgcaaaagatgtacttgggaggtgacgagcatccagcaatggggacgagagccaggtggatgggaacagggtaaacagcctctctggatccagtctgtctaccttctcaccctgaccatttctgtgtcactccccatgtgtttcaggtcatagccgcgtacccttttgtggccagaagcagccatgaagtgagcctgcaggcaggccagcctgtgaccatcctggaggcccaggacaagaaggggaaccctgagtggagcctggtggaagtgaatggacagaggggttatgtgccttctggcttcttggccagggctcggagcccagttctgtggggctggagtctgccctcttagggtaccctctttggagcctacattgccaaatgatgggggaggcttagaggctctgaccctggggggaaaagaagcaaaggaaaggtggaggtggaagggaagaccaggccagggtgggtgaagcacactcaggaggcagccagaagacatgggcgggcctcgcagagtgcttggtgtggtgggggcacaggaggctccagccaggactgctcattatgtctgcataaagaactcattccgacctggggtcacaatgcacttggacagcaggtcacagctgattggccaggactctccataggttatggccagtcttagctgtgcctgcatccgggcctgcctgtgggcgtgggtcacacgggataatgttacctgcgtgctgtgtggttgcaggaagcgggttctggaggagtccagaactgcctggtcagacagttcacttcctacacatggtatcaggagacatcataaccaatgagtcagcttttatttctctatgctggaagctgagtttatcttgggcagtgacccactgggagccctctcaagtggggaagccatggatttatcggtgtagcagagaggttcccaagactcttgactggtcctgggagtgggtgtgaccaagtcatagttctggaatgtgtgtaggcaaattcagaggctgttccagggaagaggggattttgatactgtgttaggtggggtgtgtgaggctgttggcagcaggtgaacagctactgctgtgttctcaggactagggaacaaaggggtatgcaaatcatagaggaaactctgggaaggcggtgataaggcctggtgggtggggaggttagggaatggcttgctttcctgtttctggttagaaggggagccagggggaacccccagtggtttcaggtggcccctgaggtcctggaggcagccgtggatgtgatgcaattggctgtgggaccttagatgtaggacacaacttcagtgttcccatccagaaagacctcactcacagggttgtgctgagaatgacgtggggctaagcatgcagagctccctgtaaactgtgaagtgtgatacaaatgtaaatgacagcagtgatctcggggtggcccccggcatgctgccctcccccacgcccatgcctgtggcagcaaaccttgttcatcagtatagctttctttcctgtaacccaggatctaccttggggggcttctcaatactgcattctatgtagccagcctctttaacttggtaagtgagccaccccattctagaacctggaaattggagcccctcaaaaacagttcctgttcaaggaggactgacctgctggggcaatgttgggtgcagtgcagtccctgcttggggtggtcatgtctaggctgttgctctgggcaaagataagttgcaagattcacagaaatgggaaaatgtgaccaagtgtgatcttaacaactgacaaagtttgtaaccaacccaagttagaatgtgtgtcaaacaggaggtagtttagatatgcttccaagaacatgtctgtgttataaccatagtgcctaagcagtgagctctggtttttgaagggcttttaagaaatatatacatgtctgtgtcagtctataacttgcctcctctgggcctgttaaagcatgaagactgcatgacacaagagaaatgcaagccctacggttcctttctcagcagcgaattcacttgagaggatgctcttgactcattctctctgctctttcctgctcagatttctgataaaaatagagagcataggggaacagataatgaaataggaaacccactcgtgggttccacagatacctaccgaaggcctactgtgtgctagaattgtagctcaggagttctcagtgtagctgctcactgaagttaccatggcaggtttcaactggcagaatccaggctccgtcccacccagagattctgatgaaattggtttagggtgtggctcgggcctcaggaattcagaaagcttcccaggtgcttccaatgtgcagccagggttagggacctctaccctagacacaaagtattggacagatagacctggtgccagagatggccatgagctgtaagctaggacgtgccccacctgagctctgcactagctagttcaaacaggcgctttaaaggcagtgtgaaaggggacagcctgttctgccaggtctcagaatgtatatttattaagtgccattaaaagggacctgaacaaaattggatgtcttgtaggcataagggaggaaaataaaatatacttggaaccaagtctatgtcatgaagggaaaataaaaatgtattcagtagcacgtgggttatggtttctcatagaccaggggataagattaaaagtcgctgaagagtgggaaaatgcatgttgagaagatgagaatggcctgtattttctccaggggaatctgtgtaatgtgccttttccctctccaaatgcctagaaccatggcactgtgtcttatttatttaaccgttgggctgtctcatactaaacttgcaaagatatttgcctatgaactgaacaagacttccaggagttgaagtctggttcacaagggtaccccttgcctcctgtgatggagtgagaactcttaaacccctcaggccccaactcagttgtggagatgaggacaagattacaatatcaaaagaaagatgaatgaattcttggttaatatgacgaaccccagctcaatgagtaactgatgtgaactgctgggaataaaggacttcaaagatg

SEQ ID NO: 18157 - DNA, 4403 bp, Homo sapiens
  CDS (80)..(391)
cacaaagcacggggccttgggctccccactaaggctagagggctgcgtccgaggccgtggggaggctgcctggaacaacatgcaggtattcaccttcacctggagagaggacatccggcctggagacccccagcacaccaagaagttctgctttgatgccatttcccacaccagccctgtcacgctgtacgactgccacagcatgaagggcaaccagctgtggaaataccgcaaagacaagaccctgtaccaccctgtcagtggcagctgcatggactgcagtgaaagtgaccataggatcttcatgaacacctgcaacccatcctctctcacccagcagtggctgtttgaacacaccaactcaacagtcttggaaaaattcaataggaactgagccctcatgcccccttggcaggccccccagggtctggcactcactgcagacttcctctttcaagggaggcagggcccctgtgggcactagatgtaaaaggtgctggccaaatggttcagggtgaagagggctcttgattcaggggctggggtctgcctggtccttgagcccctgagttgtgggggtagggtgaagagcatatcccacaagaggccccacagggagcagagactgctttaatccctgctgacatcacggaaaagcaacagagccttttcaactttgtcactatgtccccttgaacattatgtgggagaacaccaaggtagcctaggccacccaaaagtgagtcctgcgaggttgcccagccctcagatggctctcctacatgatggtgctttagaaacaaaggtaaaatttgcctgtttggggcagcttttagtatcgatgccactcatctgcagcagaagagaaagaagtcctcttggggctttttagtttctgccgtcctggggggaacattgcagttactgcacagcttctgttctctgtcacaaccccaggtgatttggtcgggtcaaaggccatacttggggccctaagagtgttcagtattgaatgctgatcagctgccaggtgaggagtcagaagagggagcccccccttgacatttctttgcagctatggacatgcgggatatctccccctgctctctgggtatttgaaatgtcaattttagcactctccaggcacaaggacagcccagcaccagctttacagggcagtgtttcagatggccctgagcccacggaaaaggccaggtagacctccaaactagaaatgctggctgatttgccctgatccatgcttccatttccctgtctctcttccccaggcaattactggcctcaaaagaggaacagaggtgctgcgaggtgctcacctcacagagtctggaggcctccaggatcaactgtgggcaaagtgcctgcctctgacctcatcatggttctagttctcatacagaactccagaatttttaaagaactctataattggattgcaaactaggatgctacataggattctggtattccacatccaatatggatttctagaatgctgtgattaaaggagccagccaggtgtaatacagtcaagtcagcccacagcctagagacaatctgtgaaatccaaagttggtggtgttgggaaagcagggggacatgtatccctcagcacagcagaggctgtggtacaacatggtccttggtgaagacctgcacccctggaacctcccaccatcatcacaactgtagtctcatttgcagtggagaaaagaacccgacgtcccacagccagatatacacccagctccatgccagcccttcatgtttaccttttgctttgttaattacatgtcagactcctagagggcctccagactaataggaagcatttctgtaaccaacctgccacccactgattcagtaatggaaatcacattccacaatctatggcttctaccagctagcccaggaaatacttgaaatcagcattccaattagtgttgagtctcttgattgtgtcatttaccaattaaataactgagacctaagtctgggaacagagccacaaatctgcctttgagatgctggcagatctcaaggccatcaattattgggggagggagggacaaacactcccaatcatccaccagtcagactgaatgtgtagctggcgaggaattacttccacttctggcccagcacaagccctgctttggccacctgtctgcaagagaggcggcccctgtgcttgcaacgcttacgtgttgatcccagtgtccttttccaaatgagtgctgtagctttagaagtggccctctatagaaagaagtcaaaagatgaggccccttctagaatctaggataacaagagtgttgacagtttgaggagtcgaattgagattcatcatcaaagagcaatgcagcgtcgttaaaataaaaactgtgccttttaaaaagaaaaatgcaaatatagagcaaatccctaaacttgaaccatttcctagtgccttgctagacaaacataaaggggcagggttgtggggaggggaacgtttttggtggtgtgtgcagttcctactggatgagtgtgtgtttcttaatgtctcatttcaagcaggagatgttgggtctggagcaagatctgagactgagatgtcccccaagggtgacaggtcagatttatttcagtcagtgcaagtcacactccaaactaaggctgggcagtgcgtttagtctgtggcctagaagacctcatcagcccccgagaggaggccttgcattacctcactgggacctgtttgggggccatccctgcggtccaccctctgaacccccagcatgtttgtcctgtttctcaccattgggttaaggggtgccgagcactagctagacttccacatagtcccaccccaagtgggcggcagtgttcctggcatgaccaggattcctgtgaaagcaggagcagcagcaagccgtcccgggcctgcctttcccatcctttggttctcctttccagtctgggttcacaccctgaaaagggatgggtgtgtcctctgagcactctggcatttgtcattgctgagcccatatcagtaggtcctgggacttgacaaagtatgtgggaggggaaggaaggacagaacttgactggctccatttcatggaccaactgatcaattgccagtactaagccactcattgttatggcttcctttttgaaaaccacctgtctcaaggattcaggtttctgctcacatccccagctgatgctcaataaaactcagccaggagcatatggagatgctgacagccaggtaatgggtgagactgtggggtcccttttcctctaaagcctttactctgaggataaggtcacaaagtagggtgtgacttgaaagtatcgtgaccatgtggcccaccagcagcctttccaaaggggaactccagagacatttcataatgcaaacagcactgttgctttaagaacaaggcctttggaggtggctaaacttgcacgcacgtgtgtggaaagccatcccatcttctgcctccagttggagctttcagctgttaaaacagtcagaaactattgattcttccctttaggaaaaaatgctcaggcagaacggggtacatccacaggaggaatcggacgagaggatgtgacattcggtccaggagagaaagagcagtttctgttaaagatgtaacaaatggatttccaaagtctacatgacattcacttttcaaacttcccaccagttgaatttctttttttccttaagaaacaggtgatgtcttggaaaacagctccttatgtctctctgtgcatctccattttcctagtctctggagtctcaaaaagagtggcaaagcactttacagtagtaactgaggaatcagagtctctgcttcagcgatatctagtttgtacagttgggtgatcttttgtaattcctaggaggtaatgcatttttaatgttttctgaagctttgtaagtgtgagagagggacaagaagtgcagttctgttctggaattccttattgctttcaacggacactctttgtgaaaaatccaagtaatattttagttcaaacttgatcttgagccaaggcccactgccacctctgggatgggagtcggacctacataccaagtgacaagttcaccttaacatctgcttccagaatggctttgattcagccatgccaggcaacagaacagggtcagactcctgctctgttattggcttgaagactaggatcccaaaggggttggaggcagggaatatttgaaaattcagactggaattccaggccaaaagctcaagaccaccagcctctcctcctgcctggaaaaataagcctttgtgaaagactgatttaccatgtacaattgtgattgtgaacgttgttgagtaaacctccagactttctct

SEQ ID NO: 18158 - protein, 104 aa, Homo sapiens
MQVFTFTWREDIRPGDPQHTKKFCFDAISHTSPVTLYDCHSMKGNQLWKYRKDKTLYHPVSGSCMDCSESDHRIFMNTCNPSSLTQQWLFEHTNSTVLEKFNRN

SEQ ID NO: 18159 - DNA, 4930 bp, Homo sapiens
  CDS (2095)..(2502)
aaataaaagtaaaaagatttcaaaataattcagacataaaaggagtgacattctgatacatggatggagctggagaatattatgcttagtgaaataagccagatacaaccttttgtacaaaaatacaaaattgtatgatctcatttatatgaggtagttagaagaggcaactctatggagacagaaagtagaatagaggttaccagggctgtgaggggagaggtgaatggggagtttaatgaatacagagtttctgtttggaatggtgaaaaaattctggagatggataatagtgatggttgaacaatattttgaatatatttaatgccacagaattgtacacttaaaaatggttaaaatggtaaattttacacgatatgtatctgtatctatatatatctctctctatatctatatatcttaccagaatacaaaatttaataacacactccgaaaacctttacagatgaggaaactgaagaaaactgtctacaggggaggagttaagaatttgcccaggattattcagctgggaatttgcattcgggatccaaacttagttctgtttcactacatattatctactccatattatctgttctgtgttatctgctggctttctgggtgattaaagatatgtcagctccgagaagaatgagtttatttgaatcattcagaaagttacatttaaaagtaggtaattgtagtttgatggaaggtacagtgtgaaaccctagacagactaaaggttaactttgaggatttctttctcagccagagtggtaatagtatgcatttgagaggggaggagagtagagttctaaggatgtggtctttggagacagtttcttgggttccagtccctgagctaccaatttgtgtctggggtgttatcctcttgatgtcttagcatccctatctgtaaattggtgaggataatgataacatctgataaggtggttgtgaggattaaaggaattgatacatgtgaaatccttagaactgtacctggcaaaaagtgtttgataaatgattttcagttattgtgccgatattattttagagttgatgtactttctcattaatggaaccaaacacttctcaagttaaaattacgtgcttaggactggtaagttacaaaaatggtaccacacgttttatctatttcaatttagaaatgtctgttgattaaatgtgttcgctttaaactactgaaacaatgtagacatttataaaatgaaagcgtattgatccctgttatctcattcgctacctttaacggtttggtgtatattcttccccaaattttcaaatatattcatatatgaatatgtatttttacatacattttataaaaatgggaccaagttatttggttctaacatggcttttttttaaggtcaatacaaagatctgttttattaaaaaataattgatattcctttagggctcactatatgcttggtactcttctaagtcattattttatatagatactataatatcgagagatggagagattaagtaacaactagttagtggtaaaggaaggattttaatttgggtacgttagcttcaaagtcctgatctcccagccagggatcatttttggtaaggcctgtgagctggaaacgttaacacttttaaaagagttgtaaaacaataccaccccacttccctgaagaacatataagggagactagataccgcctgccaagcctaaaatacttaccatgtggccctttacagagaaagtttgctgccccttgctctaagccatccagctgtacctctttggtgtaaggggggtgcatagtattccagtttatgaatgtgcattacgcagcaaaccaatctgttgtgattgacattgttttctctcctgaaaagaagtgaacatccttatgtatctttgaacatttgtgtgacaattttctatagagttggctctttcaagattttgaacatttctagttttaataggtgttgtcaagttatattaatttttagttaaaacaacaactgtattgaagtataatttacatacaataaaaagcacacatttgaagggtatgatttgaggagttttgacaaatgtatgcacctgcaccgctgcctggatcaagatctataatggttgccatcatctcagagtcctttcatcctcttttacagtcattctctcaactttttttttttttccctccaagatggagtcttgctctgtcacccaggctggagtgcaatggcatgatctcggctcaccgcaacctctgcctcctgggttcaagcaattctcctgcctcagtctcccgagtagctgggattacaggcgtctgccaccacacccagctaatttttgtagttttaggcgagatctcagctcactgcaaccttgacctcctgggctcaatcaaacctctcacctcagcctcccaagtagctaggaccacaggcatgtaccaccatgcccagctaacatttattattaatatttttttgtagagatggggttttcctgtgtcgcccaggatggtttccaactcctgggctcaaatgattctgccttggcctcccaaagtgttgggattacaggcatgagccgcggcacctgacttgtagtaaactctctgaattaatattccattgtaggcatgtgctacagtttttaaattcatttacccatggatggacacataggactgttgtcagctgttgataaagctgctatcaccatttgtatgtctttcctggacatgttttagtggtaaatattgattttactttgtaagaaaccgttaaactcttttccaaaatagttgtaccattttaaattgaaagttacagttgtaactgtgcaggagttacagtttcttcacattttcattgacacttcgtgttgccagtcttttaaattttggccatcaaatgagtattaagtatctcattgtgggtttgtgtttctcagatgatcaatgatgttggaacatcttttcatatgcttattggccatttgtgtactttttttggttcaagccttttgtccctttaaaaaattggattgtttgtctggttgagtggtaagaggtctttatatgttctgggtacatagtcacattatctgtcagattgtgttgccaatattttattgttcatttttgtttgattttgtgtatttttaatactataaagatcaagttaaaactttaatatgggaagcataatcagataaattatgtgaaacaaattgtccttaattcacgagtcatttaattagtgtaacaaaatgttatgcatttgcagaaacttgtaaactaaaaggatattattcatatgctgttaggtgtatggatgataacttttattaattaaactagttttgaaaattattgtatttagtaattctcttcattttgcataattcaaaccttttcatttattagtgagttaagccttaaattttttcttcaaaggataaatgagaatattaaaagtaaaaagtgaccttgatcttagaatggggtatgtagaaatgatgattgccaaacttagtttccctactttgacaatcaagtaaaattttttttttttttttttgagacggagtcttgctctgtcccccaggctggagtgcggtggcgcgatctcggctcactgcaagctctgcctcctgggttcacgctgttctcctgcctaagcctcccgtaaatttttttattatagaaatggatggcttttcagattatatatacttggtttctatacactattttatttttgtaaagtagcagttcttttgctcaacacctgaaatgcccccacaataaatttttagtttttcttcaatattcaagtaatacataacttttccttttcctgtttaacaaagaaaaaaaatatataaagcaagctgttggacctccattgggtgttgtttaccaccactgtaggtgatcgtggcattgtccacctcagtcttctcatggctgtggattcaagttatgaaattcctgaaggtagcattccaggtagtctgtagaacagcccaaactctctgaattagtattatctctgataggtgttttttttattctttgcttttttatttgagacggggttttgctctgtcacccagcctggatttcagtggcacaatcttggcttactgcaacctccacctcctgggctgaaacaatcctcccacatcagtctcctgagtagctgggaccacaggcacatgccaccatgcccagctaattttttatatttttgttagagacagagtttcactatgttgcccaggttggtctcaagattcccgagctcaagcgatgttcccatcttggcctcccaaagtgctgggattacaggcatgagccgctgtgcctggccctggtagttttcttcttatatctttctcctgttgatctcacttgattttcttactagtctacaggaaatttcacgtggagattctgtgcctgtcctctttctggaatatcttccttattttagcatctcaacatgctgttcagcttctggcttgaaaccacccctctcccatcccaaccaagttaagcagcttctttcctgcttagaagtaccataacttgtgtattaatcttttgtctttttctctctccttcccttcattttaagctcctttttattaatctgtagggcagagcttagaaaaaggtttttgtatattgtaagtactaataaaatatttgtgaagttgatttgggacttgggagacctctcttctgtaagcaactcaataaataattatttaagtaccatcctcacccagtgtactgttagctgctgttatgatattgattactgtaaaattttaaagtatatccttggtagactgttgatcaaagtcagaaagcttgagaaactctgaggcaaaaaaaaaaaaaag

SEQ ID NO: 18160 - protein, 136 aa, Homo sapiens [sequence omitted]

SEQ ID NO: 18161 - DNA, 4080 bp, Homo sapiens
agaatcctacctaatgcaacccgacttttggcctgagccattcaatggataattagtcctaactgtattgctggagtggaccattactgaagtcttaccttttttgtccttgcttttaccttgccttgttccagcaaggcttaagcatagctttaggtcctatgttatgcgcatgttatgtgattgtctgattgattacattataaactctgcacaggcggcatcacggtctttctgccctttcctgcctccctccgtccttgcactgccttgcttcatggagctttgcacttagcaggtgctcagtaaatacttgctgggtggttgacacaggattacatgttaatccatcatcttcaaaggctagaaccagacctatttaaaaaaacaaacaaaatccttccttttaaaagtggcattaccttcttaccctcacaaatgttcattttagtcgcctttattgctttctggggtagggggtcttaagggagtaactcagagagcctctttaacttaaaagaggcataataaattacagtctttaagagaagatcggatgcctgcgtgcctcccagaagtgggttaggagcacagaattctagatggctcctttgtttgcaccccaccctgtctgcagggctggcctcccacagcagtgtgtggtatcctacagatcactattaaataaacagtcccttgaaatcacaacattaaaaagtgctgtctatgtattgtaccaggagagccaaatattatggaaaaggccaaatatttccactgtgttaagaaaataagaacccagcagcatggaacttcccactcagtaggcaaaagatgtggtggagacttcaaaagggtggaagaaccatcaagacagcttgagctgcaacgggtgactgccccattaaaaaaagcaagtgtgtgtgtattccagatgcagctgcagaaatcgcaacaccacctttcaactgggaaataaatgaatgcaccaacgtatgtatcgtggctcacccaagcaatcgtccaactgtggctagggctgggggagaggttaggaggagagaggacgaagtacagaacacaaacagtctttgttctccaaagacccaaaaggcagattcacaggaagagattcctcatcctggtctgaaatgaagatagacacttggccatagggctgatggctctagcagaggccctgcccttgggatctcggcagtatctcagccaggagggctccctgactctggaagtggaatattgagtgataagaagtttggcttctcccacccactttccaccaccaggtagagcttgtgaagcctgaaaagtctgtagggccaagcagcctgactttcatggaaggagacccaggagtcaacttgttttaattaaaaagttaggttgggttatctcagggccacccccagggagggtgatgcttccaagctgaccaaattctgagctgctgagctgcttactttaatgagcttggggaagctcatttgaggagtggtggtaaaatcgctcactggacttgcaacatgagaatgttgttcatgaatcatcaggaagaactcccaggtgtggagaatggactcttgttccttcagctgatttgggacctggcactcacactcgcttactaactttctctccctagcgtaagcattcgcttcctgcctagagtctggctacctacccatcatccccattacccaaaatacaaaaacagagaactgtagcatcttattacgtagactttcctctctcccaaaagatgtgccagtgcccctgcctgccgtgccaggccctgcagggatgatgatcatggtctccagcatttactgagctgtaattctgcacagggaaccaggccaggctctgtgcaccttcctagagcctcacagcagtcctctgcggggcacgactgttctcatccactcttgtcatccccgttttacagctgaggaaccagtggctctggcaggtgttgggacgtctgcccatggtcacgtagactgtgtggcagagccggaattcaaatctaggccccatgacttcagtactgctctatctgaggactatgcagagatggcatagcccctccttcaaaagctcatagtctagttgtagagagcagagctccttgcatggacaaataatccaccaggcccagcagaactgggtaccacaaaccgcatgggatgtctaggaaggggctggaaggaagtcacggtgcactgagaatgtggtgtgccaggcggtgtgctatgtacctatgtgtccatgacctctttaattctcaaagcactcctgtgaggttcactttacaaatacaggactgaggctcagagagtcatgtagcttgcccaacaccacacagctcatgggtggtggagctgggcctgaacccacatgtctttctaactccaaaccacattctctttgcatgataccatgatagacactccatttcagtagtgttaccgggagtgaaggccttgaaggatgggtgagaggtgagaagggagaaaggagggagtgggcattccaggctgagggaaaggaagaggagtgggcctgaggagcagcaggaattccaccagccccgcccagaagtggcccagtttttatcaccatcccaaatacatcgccttggtgtacatgaacttgctgagggcctagtttccatggctccgaagaggtgacatctccctcccaccccctcatccaccctgagctccctggctgatttattcaatgtggtcatctgcaatggttgtggacctgtcaggatgacagattcgcctggggacatcctcctgtggaaggaactggattcatcccttgatcacttccatgccctgtgggtctctccctacctcttgctcattctacgagttatccctccattagccgggccgaagcatcctccaggcagggtttcctaattacctaatggtgaccatgctaccctttgccaaccttatgaaaagcatggccatgtccgttatctcatctgatcttttgctcttccaaccagcatttattaagtgcctactgtgtgccacacaccatatcaggagctgaagattcacgggtgaaccaaaacaatttcatgcctggagagaagggaggttacagagtagctgagatgactgacattaaccagaattacaaagtgcccggctctaaaatgtgctccgggacccggaaggaattacactcactagggggaaaattctagcatggacagccagttccatcagaatcctgggatcctctgtctcctaggatctgcatgtttctcagtagatctgaagctgtttgatcacctgcaggagctggggagtctgctggaggcctgggatggagttctgggcttagtctggagagaatatgtaaacaggtgcagcctccttaaggaaacctgagaggcagcaccacacagtggaaagaacagttttggagtccaacagacctggacatgcatctgggtttatatctgtgtgaccttaggcaagtcaccgaacctctctgagcccaagtatcctcacttggagaatagggatgatgatagcatggatgtgcctgaaatgcccagccaggagcccaacacatggtgacctgagcaaacatgggcatctttattagctagaggtcatgaaactctggatgtgcaaagcaggccaatttgtgatttgtttaatttacaagatttctcattttatgagaaaacttgctgacaatactttcatattgggagctcctcttaggtttgaaaaataaaataattggccgtgcacggtggctcacgcctgtaatcccagcactttgggaggccgaggtgggccgatcacgaggtcaggagattgagaccatcctggctaacatggtgaaaccctatctctactaaaaacacaaaaaattagccgggcgtggtggcaggagcctgtagtcccagctactcaggaggctgaggcaggagaatggcgagaacccgggaggtggagcttgcggtgagccgagattgcgccactgcatcccagcctgggtgacagagcgagactccgtctc

SEQ ID NO: 18162 - DNA, 3876 bp, Homo sapiens
cggtttcctccaatggtaacatcttgccaaactataggacaatgtcagagctaggatattgaccttgatacagtgaagatacagaacagttctaacaccacaacggtctctcatgttggccttttatagccataccagcttcccttctccttaacccccataaccactgatttcttctccatttctataattttatcatttcacaatataaccatatagcatgtaacctgtgggtttggctttgttcactcagcagagttctgcggaaattgggcaggttgttgcagtcactggttcatcaggtttaagactaggatacatgaggcaaagggaaatcccagagacacacttctgtgtgtttcgttgggtccccagtctgcctttttccacctttcagagtcttctgtttttttccccatataatgtacagggttctgagttatacttagtgggtgaaatagggtaaagtatgtctaattcatcttccctgaagctgaagtcagtgagattagtttcctaaagttgcaaatagccaaaagctttgctcaggtgaagtctaatgactgcaggtttaaaatttttggtttggataaattggtatttcttattcaaaattgctaagaccatatcccagctctggggttgtaatttggattttgagaaaagacagaattttaggaaaatgctgagtagaattaagaggaacaaatttctcatatggtgattattctttcattctgattatagaataacaagctgaagctatgaaaggtcatcttttccatcagatcacgaagaccaaggcttaaatcatcttaggcagagatttcaatttacaagttgtcttgggagaaaggaaaatattcaggcatacctctgagatattgtgggtttggttccagaccaccgcaagaaggcgaacatcataataaagcaagtgacgcaaattttttggtttcccagtgcatattaaagttatgtttacactatactgtaatatattaagtatgcaacagcattatgtataaaaatgtacataccttaatttaaaaatactttattgcttaaaaaaatactaacaattatatgagccttcagtgagttgtaatctttttgctggtggagggttttgtcttgatgttgatggctgctgactgaacaagctggtggttcttgaaggttggagtggctgtggcaatttctttgtgtgtgtgtgtgtgtgtttgtgtgtgtgtgtgtgtgtgtgtgtgtgtgtcttgctctgtctcccaggctggagtgcagtggtgtgatcttggctcactgctgcacctctgcctcctgacatcaagtgattctcttgcttcagcctcccaagcagctgggattacaggcaccagccaccacacccagctatttttttacatttttggtagagacacggtttcaccatgttggccaggctcgtctcgaactcctgatctcaagtgacccgcccacctcagccttccaaagtgctgggattacaggtgtgagccaccgcacccagccagcaattttttaaaataagataacaatgaagtttgtcacattgattcaactcttcctttcacaaaagattcctctgcagcatgcaacgctgtttggttgcgctttacccacagtagaacttttttcagaattggaatcagtcctctcagtccctgccactgctttatcaattaagctcatgtaatattctaaatcctttgttgtcatttcaaaaacgttaacagcacctttaccaggagtagtttccatctcgagaaaccattttcttcactcatccatatgaagcaattcctcatcagttcaagttttatcatgagatttcagcaattcattcacatcttcaggttccacatttagttatagttcttttgctgtttctatcacatctgcagttacttcttccactgaagtcttaaacccctcaaagtcatccataaggactggaatcaacttcttccaaactctcgttcatgttgataaaaatgtcaatacctcctcttctgaaccaaaatgtatttaatggcatcgaaaatggtgaattctttccaggtggttttttgattggcttcgctcagctctatcagaagaatcactacctatggcaactatagccttacagagtatatgtttaaaataaaaagacttgaaagccaaaattaccccatgggatgtaaaatggatattgtgttatcaggcatgaaaacaacctttattttccttgtgaatctttatcagagctcttgagtgactaggtgtgttgtcagggagcagtaattttattcatatatttttaaatttattttaagttctgggatacatgtgtataatgtgcagaattattacataggtaaacatatgccatgatggtttgctgcacctatcaacccatcacctaggtattaagcctggcatgcatttagctatttttcctgatgctctcccccacttcccccaagcagtaatatttttaaaggaattttttttcccctgagcagtagatctcaaaagtgggcttaaaatattcagtaaaccatggtagaaacagatgtggtgtcatctaggctttgttggcgccacttacagagcacaggcaaaatagatttagcataattcttaagggccttggtatttttggaatggtcaatgagcattggtttcaacttaaagttagcagctgactttagctcctaaaaacagagtcaacctatcctttgaagatttgaagccaggcattgacttctctctagctttgtaagtcctagatggcatcttcttccaatataaagctgttttgtctacgttgtttgtttgttgattgattaattgtggcccaggctggtgttgagctcccggcctcaagtgatcctctcgcctaggcctcccaaagtgctgggattacaggagtgagccactggcccagctgaaaacctgctgtttcatgtaaccaccttcatcaattatcttagatctttccaattgacttgctgcaccttctacttcagcatattctgtttcactttgcacttttatgttatggagacaatgtctttccttaaacctcatgacccagcctctgctagttacagatttttcttctgcagcttcttcacctcatttagccttcatagaactgaagagagttagggccttgctctggattaggttgtggcctaaggaagtgtttgatctattttgaccactaaaactttctttacatcagcagtaaggctgtttcactttcttatcatttgtgcgtgaagaatcacctttaatttccttcaagaacttctcttttgcatttacaacttggctaattggtacaagagagctcacttttggcctatctcatttttggcatgcctttctctcaaagcttaatcgtttctagcttttgctttaaagtgtgagatctgtaactctttcagttgaacacttagaggctatcaaaaggttattaattggcctaatttcaatattgtgtcttagggaatgggaggcctgaagagagggagagagacagggaaatggcctgttgatggagcggttagaacaagtacaacatttattaattaagtttgctgtcttatatgggcatggtttgtggtgtccaaaactattacaatagtaatgtcaaagatcactgatcagatcatcataacagatatgatgataatgaaaaagtttgaaatattgtaagaattaccagaatgtgacgcagagacatgaagtgagcacatactattggaaaaatgtgctaatagacttgctcgctgcagggtttccacaaatcactttgtaaaaaatgtactatctgcagagcgcaataaagcaaaatgcagtaaaatg

SEQ ID NO: 18163 - DNA, 3818 bp, Homo sapiens
  CDS (129)..(701)
aaaaaacaaggttagcctgcagcagagccgcagcagcaacagccaccaaagcgggggctgaaagggaagagaacttagatttgacctgtgcaaggacctcagcagcttggacacagcccactgcagagatgaaaggagaagctggacatatgctacacaatgaaaagtcaaagcaggagggacacatctggggctctatgaggaggacagctttcatcctgggctctggacttctctcatttgtggccttctggaactcagtgacatggcatcttcagagattttggggtgcttctggctacttttggcaagcccagtgggagaggctgctgactacatttgaagggaaggagtggatcctcttctttataggtgccatccaagtgccttgtctcttcttctggagcttcaatgggcttctattggtggttgacacaacaggaaaacctaacttcatctctcgctaccgaattcaggtcggcaagaatgaacctgtggatcctgtgaaactgcgccagtctatccgcacagttcttttcaaccagtgcatgatatctttccccatggtggtcttcctctatcccttcctcaaatggtggagagacccctgccgccgtgagctacccaccttccactggttcctcctggagctggccatcttcacgctgatcgaggaagtcttgttctactattcacaccggtgagcaggccctgcctgaggcacagctggctcctcatcctgtctagggctcactgatcaacaaggaaactgaggccaggctccttcaccacccaacattctacaagaaaatccacaagaaacaccatgagtggacagctcccattggcgtgatctctctctatgcccaccctatagagcatgcagtctccaacatgctaccggtgatagtgggcccattagtaatgggctcccacttgtcctccatcaccatgtggttttccttggccctcatcatcaccaccatctcccactgtggctaccaccttcccttcctgccttcgcctgaattccacgactaccaccatctcaagtaaggaccttctccccacaatgggtccctaggcaacaaccatcaccctccctccttaagcttctgatagcaggcactggtatctcagtttacatgtgagtgctagttggggaagaggtctgatggctgggaaaataaccacactgggatgaccttactcttttccttctgaaattgggtcctcctccaactgggggttttaaacctttatttggactctgggccctttgaataagctctggacattctctttagaaaagtacatatatgcataatactcctgcaggcaatcacaaggaagtcatgtatctctgaaagccccagactttttcaagtgtagtctacaaacctcctataccagaatcacctgagatgcttgtttaaaatataggctcttgaattccactccaaatatgctgaactaaggtatctgggggagcagggcctggaaacctgcattttagttaagtgttccaggggattctgatgctggtgatctcatacctgaagaagcctagttctgctagagattctcagactgtgggcatcaatcacacagcaagcttttcaaaggaggactccagatacggcaaattgcaggtttggagtggcccccgggagatgcattggtagcaactccccagcttattctgatgcagatggtcaggatggtggtgacaggtgtggggtaggagggctgagaaatgtgtgaggctggcacaaatgaaatgggatctgcacggaagcctccagcatgggcactgcagtgccgtcctctctcttctaggttcaaccagtgctatggggtgctgggtgtgctggaccacctccatgggactgacaccatgttcaagcagaccaaggcctacgagagacatgtcctcctgctgggcttcaccccgctctctgagagcatcccagactccccaaagaggatggagtgagagacagcctaagtgtcatcctggctgtccctcagccatgggatgcagacacggcttcctgattgcacctaacaatttgcctccttcggccacacgccctaatgatggcaccaccagggtagagggaaggtcggcttcccggaaaagcagggccaaggatgaggctttcttcaaactactgcccttgatgtccctcaataggatcaggagttagcttaagaaaaaggaaaacacagctccccagactggaggctggtcagagggaggagacccctggtcctctgctgtggaaggagaggggttcagccccagataactcctttgtggcctgggcaggatgcagagaatgacaaggctgaaaggagggggactggaggctgcctggctccagcgagagctccttctgggaccagagggtgggacggccaggtatcactttgccccttcctgccccaaaaggctttcacatacccgactcaggccagagccaagacaccctggcaaatcattataggtctcaattcatgacataccagatgccagtcgccacttcacccaacacacacacaaacatacacacaccaaacactctgagtgagtggtaaaggccccgttttaactctggcccaccgcaaacaaaaggtttccctctgtgggggagaaaaagaaatccaggagctcctccctggattaaaaccaacgaggtgcagaccaaactttaacacctttagccttatgtggaaaccaaaaaccaactgctgggaaactgtgaaaagcccttttacccacaagggaaggggtcaaagttgctgccctttggggacacccgagacccctaattagcctatctgaatgaggaccaaaggttagagccctctttctccccgaagaaagagcccggaaaaacatggcagagcaaagagcaaaatcctttctcccccgaatgctttaccagtttctcagcaacatttattcaagatgatttttaccaggaaccttatcaaaggcaaaaccacagcagcttgggttgaagtccccatcctggcctcctctcagccgccagacatggccaggaaccctgtggttcccaagaacaatttaaagatcactctttgatttgaaagaccaccattatcattttactaaattcttatatatacttgtgccttttccaactttcagttctcttaagaaaaacatccactgtagctttataaaataccttagtatcagctaggtccaagtctccaggcaggactatcaaaatggactccttcttcctatcagctctagaaccccagaggacttgcccagtaggccagctgagcatttaccaggcagcatctccctggccttccacagtctcgcctgtctgtctctggccttggtggacctggctccctccctaggaggcttttgccctcagcttgaatacagttcctggtgcatcaaagctgtaagttctcagctgctggcctgcgctcatcacctcttcctacaaataaacatttggaaaaaagtccatcttcaatatgcttaaagagaagggtaggagataaggagaaagaacagatacggtttttttcccctttaaggcctttagattttgaggtactgtaaggggcctagaaggacaaaaggctttcattccctcttccttttggcaggcaggttatcagtccttggcagaagggcccagccctatccttttctgtatcaaacaaaatccttgaggttggtatacaagttaaggctgaaaaaaggccttaaattcccagtaaagaatgtgaaagcaagcatgtaaaataaactggtcttcatg

SEQ ID NO: 18164 - protein, 191 aa, Homo sapiens
MKGEAGHMLHNEKSKQEGHIWGSMRRTAFILGSGLLSFVAFWNSVTWHLQRFWGASGYFWQAQWERLLTTFEGKEWILFFIGAIQVPCLFFWSFNGLLLVVDTTGKPNFISRYRIQVGKNEPVDPVKLRQSIRTVLFNQCMISFPMVVFLYPFLKWWRDPCRRELPTFHWFLLELAIFTLIEEVLFYYSHR

SEQ ID NO: 18165 - DNA, 3977 bp, Homo sapiens
ctgcatggctggggaggcctcacaatcatggaagaaggtgaaggaggagcaaagggaagtctatcatggcagcaggcgagacagtgtgtgtaagggaactcccatgtacaaaaccatcaaatctcttgagacttatttactatcatgagtacagcatgggaaaacctgtccccatcattcagttacctcccaccaggtcccttccaggatatctggggattatgggagctacaattcaagatgagatttgggtggggacacagccaaaccacgtcaccatctggtttgacttctccttagaggccacatcatgggcctgtcagccaccataattctgggactcttttcccaagttcatgtccataacccctcttccgtctgcaactgggaggtcagctttcatgaacattcccaggagaaagcgaggtggggaggaggtggagctggaaaactgccaaccctaaagagaaaggagtacctttgggcagttacctagggtagaagagctgttcgcacaaagaacccacagtactaaaatgactttcacagactccactcataggcaaggctgctattgagctgatgaacactggcacagccatgccagttgctaaaatacagaaattcttttgtgtaaattgataaagagcaaccaccctggacactctaagtctagtccaactgcccaaagtcaccctgacccaaagtcaaccatttaagatgatcccatgagccagcaagtaaagggttaatgtttggcggggctggggcaccaggactctctttcacaccccctcccaaggcgtgatgcccagtgcttggtcatggtctgtcagtattccaaatatcattcctgcgctgggagatcagaaatatttgcagatatgactgtctggtccacttggtgctgcacttctaagacccattttagagttgagtcaagggaaaaggaaaagtggctgcaggccgggcgcagtggctcatgcctgtaatcccagcactttgggaggccgaggcgggtggatcatttgagatcaggagtttgagaccagcctgaccaacatggtgaaaccccatctctactaaaataaaaaaattggccgggtgtggtggcgggcacctgtaatctcagctactcaagaggctgaggcagtagaatcacttgaacccaggaggcagagattgcaatgagccaagattgtgccactctattgcagcctgggtgacagtgagactgcctctcaaagaaaaaaaagtgggtgcaaatatctggggtgtttcagagggccaaatgtcaaggaacaaacctactacttggatctgtcactttaagtgaatgtttgttttctggtttgtagggaagaaggtattttattcagttcttttcagtcagtacaatcctggcataatatacggccaccatgatgcagtccctcccttggaacagcagctggtgagtaattaccctgcagatggctctgtgtggctctgtttagtgtctgtcattaccaggggtacctgaccatgagcaaaggtgagtagaaatctgtgcaatgattcccttagtagtttttacgtttggcagatgtgctggcctctgctcccggcgcctcgttgattaaaagtgcttgcaatatttaaagtggaaaataaatggaagcagtactttacagagaggtaatttcacaccttcatagtttccatcactggtttttggaaactggtattgttgcattatggatgcagtacagtttctcttgatttttgcaaaatcctacaaggtaacaaaggtgagatttatgttcccatttgacagaaatcagaatggggtggctcaccccagagagggccagagcaattccctggaccttgcaggcaaataaggtctttgtgaatttgaagtggaaactcccagtgtgctcccagtgcccttcccgtcatgccaccgttcccttcccatcatgccactgttcccacacatcacagtgtttgggtagacgttagcattaaaggtgtcactggcaaggtggctctcaaaggaatattggaaggacttctctgctaagatcctggctgcacaggtgatggatagtggatgcacacagcccccaagggtccctgtagggtgagatgtctctgttgtcacaggcagttagtccactttgcagagaagcaatgcaagcagcaggaggaaaggcaagccagaagaggatctctgtgtcttctgggcatggcccccatggatggaatttcccggtattgttgacagcattggcagagagggaaaaggcccttctcccacctcaagttgggctgtgattttttcctgcggggagatgagccaggtttgtctgaagctgtgttctggcccaggctgtatctcatggtggccttcccatctgagggacgtctgttcttctttgctgtgggtagctctgcctcttgctaaagaaaatccatgcttcttcccactgaggaccccttagggtggaggaaggacatctgctgtgggaacctgaagacacgatagcaccaggcctctgatgcttccgtacaatgggagagtaaactgatttccatccaaaacccatgttctggatgcgtttgaggattgactttgtgtgtaagcttctagaaatagcaaacctgttgtttccagccccatcctgtgcctttcatcctctctccccaagttaacctctggcaactgatattatgatattttccagaaagtttcaactttggggccctcaggttggacaatgtcatgtcttatatcctagcatggcttcatgttggggtgcaccaggtttactaataatacagttctcttttcccctagtggaattgcaataccacagatatactgtgtatctgtttttgtagtgtatctgtatctgtgctttatacataaaaacagtaagagtttttcacgtcttaagaatcagttttcagctgggtttggtggctcatgtctttaatgccagcactttgggaggccgagatgggcagatcacttgaggccaggagtttgagaccagcctagccaatgtgtcaaaacccatctctactaaaaaataaaaaattaggcgtgcatagtggcacacacctacagtcccagctactaggcaggttgaaaatcgcttgagcctgggaggcagaggctgtagtgagctgagatcgcaccactgcactccatcctgggtgatggagtgagaccctgtctcaaagaaaaaaaaaaagtgagttttcatctatagtcatgtgttacttaacaatagagagatgtcatgtatcgtcaggcaatttcatcattgtgcaaacatcatacagcgcacttatgcaatcctacataacatagccaactacacacgtaggctgtatggtacaggctgttgctcctaggttacaaacctgtacagcatgtgattgtcctgaatactacaggcaattgaagcacgatggtattcagtatctaaacatagaaatggcacaggaaaaatatggtataaaagattttaaaaatggttcccatgagtggagcttgtaatacaggactagaatttgctctgggtgagtaaatgagtggatggtgagtgaatgtgaaggcctgtgacattactgtccactactgtggactttataaccactgtagacttaggtgacactaaacttattttttaaaagttttccttggccgggtgtggtggcccacacctgtaatcccagcactttgggaggccgaagcaggtgaatcatgaggtcaggagttcgagaccagcctggctaacatgatgaaaccccatctctactaaaaattcaaaaattagctgggcatggtggtatgcgcctgtaatcccaactactccacaggctgaggcaggagaatcacttaaacccgggaggcagaggttgcagtgagccgagatcgtgccactgcactccagcctgggcaacagagcaagactctgtctcag

SEQ ID NO: 18166 - DNA, 5122 bp, Homo sapiens
  CDS (59)..(1894)
gactggaagaaagtgaaggggagctccggaagaacctggaggagctatccaggtgaagatggaacgggagcagcatcagactgagatcagggatctccaggaccagctctcagaaatgcacgatgaactggacagtgcaaagcgatcggaggacagggagaagggagctctgattgaggagctcttacaggcaaaacaggatcttcaagatctgctgattgccaaagaggggcgagaagacctcttgagaaagcgagagcgtgaactcaccgccctgaagggagccctgaaagaagaggtttccagccatgatcaggagatggacaagctgaaggagcaatatgatgctgagttgcaggccctgagggagagtgtggaagaagcaaccaagaatgtcgaggtcttggcgagcaggagcaacacttcagagcaagaccaggcggggactgaaatgcgcgtgaagcttctgcaggaggagaatgagaagctgcagggaagaagcgaagagctggagcggagagttgctcagcttcaaaggcagatcgaggacctgaaaggcgatgaagccaaggcgaaggaaacgctgaagaagtacgagggagaaatacgacagttagaggaggcccttgtgcacgtcagaaaggaagaaaaagaagctgtgtcagccagaagggccctggagaatgaactggaggctgctcagggaaatctgagtcagactacccaggagcagaagcagttgtctgagaagctcaaagaggagagtgagcagaaggagcagctaagaaggttgaagaacgagatggagaatgagcggtggcacctgggcaaaaccattgagaaactgcagaaggagatggcagacattgttgaggcctcccgtacctcaaccctggagctccagaaccagctggacgagtataaggagaaaaaccgcagggagctcgcagaaatgcaaagacagttgaaggagaaaacgctggaggcagaaaagtcccgactgacagccatgaaaatgcaggatgggatgcgtctgatggaggaagagttacgggactaccagagagctcaggatgaagcactcacaaaaaggcagcttctggagcagacgctgaaggacctggagtatgagctggaagccaagagtcacctcaaagatgaccgcagcaggctggtcaagcagatggaggacaaggtgtctcaactggagatggaactggaagaagagagaaacaactcagatttgctgactgagaggatcagtaggagcagggaacagatggagcagttgaggaatgagctacttcaggagagagctgcgagacaagacttggagtgcgacaagatttccctggagaggcagaacaaggacttaaagagccggattatccacctggaaggttcctacaggtccagcaaagaggggctggttgtgcagatggaggccaggatcgcggagctggaggaccgcctggagagtgaggagagggatcgggccaatcttcagctcagcaaccggcggctggagcggaaagtgaaggagctggtgatgcaggtggatgatgagcacctgtcattgactgatcagaaggaccagctgagcttgcgtttgaaagccatgaagcggcaggtggaggaggctgaggaggaaatcgacagactggaaagttctaaaaagaagctgcagagggagctggaggagcagatggacatgaatgagcatctgcaggggcagctcaactccatgaagaaggacttaagactgaagaagctgccgagtaaagtgctggatgacatggatgacgacgatgacctcagcacggatgggggaagcctctatgaggcgcctgtgagctacacattctccaaggacagcaccgtcgccagccagatctgagtgctctcccgggctgtggaagtacctgtcattcctgcaggagctgcagccacccaaagtgggaggcagggaggggagcatctgtctgccactgagaccaatcacagcctctttgcacagcatgccagctcctcagtgttacattcctcgccagggtctctcagtgggtcttcgacagagagcttttgcagtttaaaatgttgggatgcctgaggaccaggagccaccacccactggggtgttgtgagagatacactttggtaggctgaggcccctgttccacagccactatttgcattgctgtccctgccccctcatcactccccctgccaagacaaagggtccagaaggctaggacttacttaatagcactgtgcagggaggaaaccatgtatagcttgtacatattttaaaccagaccttctcacgaactgctgctgttgggtttggaatgtgatggaggcttggtagggtggctggtttgtaaagttcatgcatctatattgagtattctttttttttttttttgagatggagtttcattcttgttgccgaggctggagtgcaatggcgcaaccttggctcactgcaacctctgcctccctggttcaagtgattctcctgcctcatcctcccaagaagctgagattacggatgaccaccaccactcctggctaattttttgtatttagtagagacggggtttcaccatgttggtcaggctggtcttgaactcctgacctcaggtgatccacctgcctcagcctcccaaagtgctgagattacaggcatgagccaccacgcccagccattgagtattcttttttaaaatatgaagctattagattttaagtgttgaggagcagaggtgagaagagagagagagagagaaagtcaaataaagtcaaagaccagtttggaaaccaaagttggaaaagaagaattgtagtggtcatggacagctaagactgagcatagcagttcacatggtctgggtaaacaagtcactggcacaggggaaagccagaaggttgcttgtgtctgtgactgcagctatggccttgtttgcttagtttatctggaattctgttataatttctgaactgttctgagacctgttcccagtcactgattgcaatttcttttacacaggttgggtagggagagttgtaggtaaggccttaaacaaatgaggccgtttctggaaggatagggctgtgtggtcatgtcccacagcaagcttttgggatcgggggaataagagggtatgggggaaaggttcatagacttaggtgtgagaatgaggtgggaggtgtctggtaaggtcatgggggaagggagatgagagaggagataggcagatgtgggtatggggcccagtgtgagaaggaagacagagaagttcttgaaagctgggggatgtgtgggcaagaggtggattgagcaggatctcagggttatgtcgaggaagggaagaaagaaacagaagtcaggcagaggcgtgtctgtgcaaactggaggactccttccaacttcctggaacaaagcgacatcgccagcagcaggctggcagggagtggttgaggtctgggggccaggccacatggctggagaggaatttcagggagcatagcatcgggaggatgctacatatccagggactccctcctggccttcctgtgtcacttcacaatgtgacagtccccaggcatgcccacaggccaggcccagtcacagctgggcttccacaggtcagaatatgggacaggacatggtcagggagaggaccctgtgagttggtgacatatatgtggcagagatggtagtgctcagctgcttcagcagtgtccccaaccatcccaatagggtgggggcctgtgggccagaggactccatgacagtagccatggagtcccacctgtgccaggtcagagcccacccggcaggtttcagagtggtcagcccagtttaagggtgggagtctggagccagacagccaagccccttccacatctacagggtcactgtcatcctcaccacagccaggggtgattctcacctctgcctgcttatgtggggtgtggccgattcctccctttagtcattcattcatttagcacatatttattgggcatcggtgatgtgtcaggcacagtccttggcacacagaatacagcagtgaattaaacaggcaaaaattcctcccctcctggagctcagtgtcaggaaagggggtgataaatgacaatcaaatcgacatggaggttgagcacctctgtactcagccctctgtctgtccttctgaggacgcaacaagcctggttccctagagctcactttgaccctcaatatgttcataatttccctgctgcttctcccatcgttagacatctgccagtaagcctgctgagagaagcctcagcccactcatacctagagacgctgctggggaaggtcagcacacccaagaactttgggagtgtgtgtctgttttggtttgtgagaaagtagctgcccctcattctggccagttctttccagtagccatggggctggctacaagaagcaaaactgcccatgcaaagagaacacaggtcacttttcaaaacacttgcatcattaccctaaaaataggctgttatgcgttttgacaattgcgctatcctacactctgagggagttggcaacgcatgcggtatagtggagtgggaagagttgagactgaaagttaagagaagggttttcaagtcccggctcatctcaccccagtgactttgacagtgtgctcactctcagagccatggattacctggaacaaagtgcagattagtgcccacggtcctttccaggtataacatgctatcgttctttaattttattatatatacatacttttcttctgttttttgctttaagaactaaccccgatcaagagtattttctttagctagcttaaaaagaaaacatatattttatgtaaaaacacatacatggccaaatgcaatactgaagagacaatcatcctgtatcttttatggtttttcctgcttctgagcgtcgttctacaatgcccgttgacttattccattgcgtctctgctttagggtatggtttggtcgctttggttgtcatgagaaagagacattctccttgcagctacctccatgtgagtgaattcctggataaagcaagatttcctttcaataaacgctgtcacccaatggg

SEQ ID NO: 18167 - protein, 612 aa, Homo sapiens
MEREQHQTEIRDLQDQLSEMHDELDSAKRSEDREKGALIEELLQAKQDLQDLLIAKEGREDLLRKRERELTALKGALKEEVSSHDQEMDKLKEQYDAELQALRESVEEATKNVEVLASRSNTSEQDQAGTEMRVKLLQEENEKLQGRSEELERRVAQLQRQIEDLKGDEAKAKETLKKYEGEIRQLEEALVHVRKEEKEAVSARRALENELEAAQGNLSQTTQEQKQLSEKLKEESEQKEQLRRLKNEMENERWHLGKTIEKLQKEMADIVEASRTSTLELQNQLDEYKEKNRRELAEMQRQLKEKTLEAEKSRLTAMKMQDGMRLMEEELRDYQRAQDEALTKRQLLEQTLKDLEYELEAKSHLKDDRSRLVKQMEDKVSQLEMELEEERNNSDLLTERISRSREQMEQLRNELLQERAARQDLECDKISLERQNKDLKSRIIHLEGSYRSSKEGLVVQMEARIAELEDRLESEERDRANLQLSNRRLERKVKELVMQVDDEHLSLTDQKDQLSLRLKAMKRQVEEAEEEIDRLESSKKKLQRELEEQMDMNEHLQGQLNSMKKDLRLKKLPSKVLDDMDDDDDLSTDGGSLYEAPVSYTFSKDSTVASQI

SEQ ID NO: 18168 - DNA, 5127 bp, Homo sapiens
  CDS (2572)..(4950)
ttggcccaggaagtcgtttgtttggacagtagcggtggcagtgaggatgaaaaaagcagtcgagatgaggtgattgaactgagctctggagaggaggacactctgcacattgtggacagcagtgaatctgtcagtgaagatgatgaggaagaagagaagggtggcacccatgtcaatgatgtcttaaaccagcgtgacgcccttgggcgggtccttgtcaacctaaaccaccctccagaggaggaaaatgtcttccttgccccacagttggcacgggctgtgaaacctcatcagattggcgggatccggttcctttacgataacctagtggagtctctggagaggtttaagaccagcagtggctttggctgtattctggcccacagcatgggtctggggaaaactttgcaagtgatctctttcatcgacgtcctcttccgccacacgccagccaaaacagtccttgccattgtgccgaattggctggcagagttcaacatgtggcttccacctcctgaagccctcccggctgacaacaagcctgaagaagtccagcctcggttctttaaagttcacatcttgaatgatgagcacaaggcgatggcatctcgtgctaaagtgatggctgattgggtgtcagagggtggcgtgctgctgatggggtacgagatgtacagactcctcactctgaagaaatcatttgccacaggtagaccgaagaaaaccaagaagcgttctcacccagtcatcattgatctagatgaggaagatcggcagcaggagtttcggagagagtttgagaaggctttatgccgccctggccctgatgtagtaatctgtgatgagggacaccgcatcaaaaactgccaggccagcacctcacaggctctgaagaatatccgctctcgccgccgggtggtgctgactgggtaccctctgcaaaacaacctcattgagtactggtgcatggtggactttgtgcgcccagacttccttggcacccggcaggaattcagcaacatgtttgaacgccctatcctgaatgggcaatgtattgacagcacacctcaggacgtccgcctcatgcggtaccggagccatgtcctgcacagtcttctggagggctttgtgcagaggagaggccacactgtgctgaagattcatctccctgccaaggaagaaaatgtgatccttgtgcggctctccaagatccagcgagatttgtatacacagttcatggatcgcttccgggactgtggtagcagcggttggctggggctgaacccccttaaggcattctgtgtgtgttgcaaggtgcattggggcctcagggaagattgagatggggactaaggatacacatggtcccaagggagttactcctactgagagtcttcaataaagggagaataaagtgagaaggggccacctcagttcactgcactggaggtttgggggctccaaggagagaggtgatggtttgtaccacattactcctgggggtgccattcacacagtgtaatataactgatgccccctgcagtgtgcaactcagctgcacaacttgttattccaaggggattaatggaaaaatactgtggggcagcgtttttgactgctagcataatcagaattcaagagatatatagcttagacaagttattaggggtaccttccattggattccatacttaatcagattgagacctctctcattcttttcttgagggacctgtttcattgacttcatacctctacccctggctactcttcagcagacctgttaggtaatattcttaattgaccactgctttaataagtcagcagaaggtatgtgtctggggacaagaggggtttccaaatatttcttttatagccacagtcctgggtcaaggccaggaaactaaggcaagcgtggtctgtgatgatgctttggtatcactgcatccttccttcttcctttcctctcttctcctgggagttctcaactcttgctaggaatactctgtgaaatgatatgtgattggtctactataagtcagatacattttgtctatagttttatacagtagcagactgtagccacactgtgaaactggaacattcttactcttatttgaataagaatgtcaaaaaggcttgtgacagcttttttgattatgtatcaaacatacttactggcatggctcctggtatgcatgctgccattcatgtgtcatggtgaccagaactgataatcaaaacaaatatgcaggccctttggctgtgaagggctctgactttaatttttggtgtgacagtgtttattgtgggacgtgtgtgtttgagcaagtatgtgtttccagactccctgggacacccttggaatgttttttgtcctgtgtctcctctccctttccttgaacctcagatctggaatcaccctgatgtgctgtatgaagcccttcagaaggagagcttggccaatgagcaggacctagacgtggaagaacttggctctgcagggaccagtgcccgctgtccaccacagggaacaaaggcaagggagaggatagcaccttggcttcctcgatgggagaggcaaccaatagcaagttcctacagggcgttggcttcaaccctttccaggagcgaggcaacaacattgtcacatatgaatgggccaaggaccttctgactaattaccggactggagtcctagaaaactctcccaagatggtactgcttttccacctgattgaggaaagtgtgaagcttggggacaagatccttgtgtttagccagagtctttccaccttggctctcatcgaggaattccttggaaaacgagaagtaccctgtccacctggtaccgaggggcaaggagcacagaagtgggttcgaaacatcagctacttccggctagatggtagcacccctgcctttgagagggagcggcttattaatcggttcaatgatcccagcaacctcaccacctggctgttccttctctctacaagggccggatgcttgggtgtgaatctgattggtgccaaccgagtggtggtgtttgatgcttcctggaacccttgccatgatgcccaggcagtatgtcgggtataccgttatggccagaaaaagccctgttacatctatcgccttgtggctgattacactctagaaaagaagatctatgaccgtcagatttccaagcagggcatgtcagatcgggtggtggatgatctaaatccaatgctgaacttcacacggaaagaggtggaaaacctactgcactttgttgagaaggagccagctccccaagtttccttgaacgtaaaggggatcaaggagtcagtcctgcaactggcctgtctgaagtaccctcacctcatcaccaaggagcctttcgagcatgagtcattgctcttgaaccgaaaggatcacaagctaaccaaggctgagaaaaaagcagcaaagaaaagctatgaggaagacaaacgcacatcagtcccctatacccgcccatcgtatgcgcagtattaccctgccagcgatcagagcctgaccagcatccccgccttcagccagagaaactggcagccaactttgaagggtgatgaaaagcctgtggccagtgttcgtcctgtgcagtccacccccatccccatgatgccccggcatgtcccattgggaggaagtgtaagctctgcctccagcacaaatccatccatgaactttcccatcaactacttgcagcgtgcaggagtccttgtgcagaaggtggtcaccacgacagatattgttattcctggactcaacagctccacagatgtacaggcaagaattaatgctggtgagagcatccacatcatccgtgggacaaaagggacgtacatccgtaccagtgatggacggatctttgctgtccgggcaactggcaaaccaaaggttcctgaagatggtcggatggctgcctcaggttcccagggaccttcttgcgagtccacaagcaacggcagacacagtgcctcatcacccaaagcccccgaccctgaggggctggccaggcccgtctctcctgacagcccagagatcatcagtgagcttcagcagtatgcagatgtggctgctgcccgggaatcccgtcagagctccccaagcaccaatgccgccctgcctggccccccggcccaacttatggacagcagtgctgttcccgggacagctctcggaactgagcctcgactagggggtcattgcctcaatagttccctcttggtgactggccagccctgtggtgacaggcacccagtgctggacttaaggggccacaagcgaaagttggccacaccacctgctgcccaggagtcatcccgccggcggtccaggaagggtcatctgccagcccccgtgcagccgtatgaacacgggtatccagtctctggcgggtttgccatcccacccgtctccttaaaccataacctcaccacccccttcacctcccaggctggggagaactccctgtttatgggcagtaccccctcctactaccagctgtccaatttgctggcagatgcccgcctggtgtttccagtgactactgaccctctggtgccagcaggccccgtcagttcctcttccacggcttcctcagtcactgccagcaacccctccttcatgctcaacccttctgtgccagggatactacccagctattcactcccattctcacagccactcctgtccgagccgaggatgtttgcgccttttccttcccctgtcttgcccagcaacctttcgcggggcatgtctatctatccaggctacatgtccccacatgcaggctacccagctggtggcctcctacggtcccaggtgcctccatttgactctcatgaggttgccgaggttgggttcagctccaatgatgatgaggataaagacgatgatgtgatagaggtcactgggaaatagctagggagcccctccccacctcacttggggcccccagcaggttgcccaccaagctggaaggcagtgatttagaccttttgagaataggacacttggcaggagggaaaaggaagaggacaaaggagggtggttggccaaagtggcagagctctgttgctgtttaacaaaagaggc

SEQ ID NO: 18169 - protein, 793 aa, Homo sapiens [sequence omitted]

SEQ ID NO: 18170 - DNA, 5097 bp, Homo sapiens
  CDS (72)..(1910)
ctagctatggaattactgctttcaatcatcccctgaatctcaccaagcagcagctctcagaggtggctctgatgaccacatcagtggatgtccttgtgtccatctgtgtcatctttgcaatgtccttcgtcccagccagctttgtcgtattcctgatccaggagcgggtcagcaaagcaaaacacctgcagttcttcagtggagtgaagcctgtcatctactggctctctaattttgtctgggatatgtgcaattacgttgtccctgccacactggtcattatcatcttcatctgcttccagcagaagtcctatgtgtcctccaccaatctgcctgtgctagcccttctacttttgctgtatgggtggtcaatcacacctctcatgtacccagcctcctttgtgttcaagatccccagcacagcctatgtggtgctcaccagcgtgaacctcttcattggcattaatggcagcgtggccacctttgtgctggagctgttcaccgacaataagctgaataatatcaatgatatcctgaagtccgtgttcttgatcttcccacatttttgcctgggacgagggctcatcgacatggtgaaaaaccaggcaatggctgatgccctggaaaggtttggggagaatcgctttgtgtcaccattatcttgggacttggtgggacgaaacctcttcgccatggccgtggaaggggtggtgttcttcctcattactgttctgatccagtacagattcttcatcaggcccagacctgtaaatgcaaagctatctcctctgaatgatgaagatgaagatgtgaggcgggaaagacagagaattcttgatggtggaggccagaatgacatcttagaaatcaaggagttgacgaagatatatagaaggaagcggaagcctgctgttgacaggatttgcgtgggcattcctcctggtgagtgctttgggctcctgggagttaatggggctggaaaatcatcaactttcaagatgttaacaggagataccactgttaccagaggagatgctttccttaacaaaaatagtatcttatcaaacatccatgaagtacatcagaacatgggctactgccctcagtttgatgccatcacagagctgttgactgggagagaacacgtggagttctttgcccttttgagaggagtcccagagaaagaagttggcaaggttggtgagtgggcgattcggaaactgggcctcgtgaagtatggagaaaaatatgctggtaactatagtggaggcaacaaacgcaagctctctacagccatggctttgatcggcgggcctcctgtggtgtttctggatgaacccaccacaggcatggatcccaaagcccggcggttcttgtggaattgtgccctaagtgttgtcaaggaggggagatcagtagtgcttacatctcatagtatggaagaatgtgaagctctttgcactaggatggcaatcatggtcaatggaaggttcaggtgccttggcagtgtccagcatctaaaaaataggtttggagatggttatacaatagttgtacgaatagcagggtccaacccggacctgaagcctgtccaggatttctttggacttgcatttcctggaagtgttctaaaagagaaacaccggaacatgctacaataccagcttccatcttcattatcttctctggccaggatattcagcatcctctcccagagcaaaaagcgactccacatagaagactactctgtttctcagacaacacttgaccaagtatttgtgaactttgccaaggaccaaagtgatgatgaccacttaaaagacctctcattacacaaaaaccagacagtagtggacgttgcagttctcacatcttttctacaggatgagaaagtgaaagaaagctatgtatgaagaatcccgttcatacggggtggctgaaagtaaagaggaactagactttcctttgcaccatgtgaagtgttgtggagaaaagagccagaagttgatgtgggaagaagtaaactggatactgtactgatactattcaatgcaatgcaattcaatgcaatgaaaacgaaattccattacaggggcagtgcctttgtagcctatgtcttgtatggctctcaagtgaaagacttgaatttagttttttacctatacctatgtgaaactctattatggaacccaatggacatatgggtttgaactcacacttttttttttgttcctgtgtattctcattggggttgcaacaataattcatcaagtaatcatggccagcgattattgatcaaaatcaaaaggtaatgcacatcctcattcactaagccatgccatgcccaggagactggtttcccggtgacacatccattgctggcaatgagtgtgccagaattattagtgccaagtttttcagaaagtttgaagcaccatggtgtgtcatgctcacttttgtgaaagctgctctgctcagagtctatcaacattgaatatcagttgacagaatggtgccatgcgtggctaacatcctgctttgattccctctgataagctgttctggtggcagtaacatgcaacaaaaatgtgggtgtctctaggcacgggaaacttggttccattgttatattgtcctatgcttcgagccatgggtctacagggtcatccttatgagactcttaaatatacttagatcctggtaagaggcaaagaatcaacagccaaactgctggggctgcaagctgctgaagccagggcatgggattaaagagattgtgcgttcaaacctagggaagcctgtgcccatttgtcctgactgtctgctaacatggtacactgcatctcaagatgtttatctgacacaagtgtattatttctggctttttgaattaatctagaaaatgaaaagatggagttgtattttgacaaaaatgtttgtactttttaatgttatttggaattttaagttctatcagtgacttctgaatccttagaatggcctctttgtagaaccctgtggtatagaggagtatggccactgccccactatttttattttcttatgtaagtttgcatatcagtcatgactagtgcctagaaagcaatgtgatggtcaggatctcatgacattatatttgagtttctttcagatcatttaggatactcttaatctcacttcatcaatcaaatattttttgagtgtatgctgtagctgaaagagtatgtacgtacgtataagactagagagatattaagtctcagtacacttcctgtgccatgtttttcagctcactggtttacaaatataggttgtcttgtggttgtaggagcccactgtaacaatattgggcagccttttttttttttttttaattgcaacaatgcaaaagccaagaaagtataagggtcacaagtcaaacaatgaattcttcaacagggaaaacagctagcttgaaaacttgctgaaaaacacaacttgtgtttatggcatttagtaccttcaaataattggctttgcagatattggataccccattaaatctgacagtctcaaatttttcatctcttcaatcactagtcaagaaaaatataaaaacaacaaatacttccatatggagcatttttcagagttttctaacccagtcttatttttctagtcagtaaacatttgtaaaaatactgtttcactaatacttactgttaactgtcttgagagaaaagaaaaatatgagagaactattgtttggggaagttcaagtgatctttcaatatcattactaacttcttccactttttccaaaatttgaatattaacgctaaaggtgtaagacttcagatttcaaattaatctttctatattttttaaatttacagaatattatataacccactgctgaaaaagaaaaaaatgattgttttagaagttaaagtcaatattgattttaaatataagtaatgaaggcatatttccaataactagtgatatggcatcgttgcattttacagtatcttcaaaaatacagaatttatagaataatttctcctcatttaatatttttcaaaatcaaagttatggtttcctcattttactaaaatcgtattctaattcttcattatagtaaatctatgagcaactccttacttcggttcctctgatttcaaggccatattttaaaaaatcaaaaggcactgtgaactattttgaagaaaacacgacattttaatacagattgaaaggacctcttctgaagctagaaacaatctatagttatacatcttcattaatactgtgttaccttttaaaatagtaattttttacattttcctgtgtaaacctaattgtggtagaaatttttaccaactctatactcaatcaagcaaaatttctgtatattccctgtggaatgtacctatgtgagtttcagaaattctcaaaatacgtgttcaaaaatttctgcttttgcatctttgggacacctcagaaaacttattaacaactgtgaatatgagaaatacagaagaaaataataagccctctatacataaatgcccagcacaattcattgttaaaaaacaaccaaacctcacactactgtatttcattatctgtactgaaagcaaatgctttgtgactattaaatgttgcacatcattcattcactgtatagtaatcattgactaaagccatttatctgtgttttcttcttgtggttgtatatatcaggtaaaatattttccaaagagccatgtgtcatgtaatactgaaccactttgatattgagacattaatttgtacccttgttattatctactagtaataatgtaatactgtagaaatattgctctaattcttttcaaaattgttgcatcccccttagaatgtttctatttccataaggatttaggtatgctattatcccttcttataccctaagatgaagctgtttttgtgctctttgttcatcattggccctcattccaagcactttacgctgtctgtaacgggatctatttttgcactggaatatctgagaattgcaaaactagacaaaagtttcacaacagatttctaagttaaatcattatcattaaaagg

SEQ ID NO: 18171 - protein, 613 aa, Homo sapiens
MTTSVDVLVSICVIFAMSFVPASFVVFLIQERVSKAKHLQFFSGVKPVIYWLSNFVWDMCNYVVPATLVIIIFICFQQKSYVSSTNLPVLALLLLLYGWSITPLMYPASFVFKIPSTAYVVLTSVNLFIGINGSVATFVLELFTDNKLNNINDILKSVFLIFPHFCLGRGLIDMVKNQAMADALERFGENRFVSPLSWDLVGRNLFAMAVEGVVFFLITVLIQYRFFIRPRPVNAKLSPLNDEDEDVRRERQRILDGGGQNDILEIKELTKIYRRKRKPAVDRICVGIPPGECFGLLGVNGAGKSSTFKMLTGDTTVTRGDAFLNKNSILSNIHEVHQNMGYCPQFDAITELLTGREHVEFFALLRGVPEKEVGKVGEWAIRKLGLVKYGEKYAGNYSGGNKRKLSTAMALIGGPPVVFLDEPTTGMDPKARRFLWNCALSVVKEGRSVVLTSHSMEECEALCTRMAIMVNGRFRCLGSVQHLKNRFGDGYTIVVRIAGSNPDLKPVQDFFGLAFPGSVLKEKHRNMLQYQLPSSLSSLARIFSILSQSKKRLHIEDYSVSQTTLDQVFVNFAKDQSDDDHLKDLSLHKNQTVVDVAVLTSFLQDEKVKESYV

SEQ ID NO: 18172 - DNA, 5385 bp, Homo sapiens
  CDS (57)..(545)
aggaacccgagccgcacggaacggcggtggtggcccgcggagccggacggggcactatgaacgaagaggagcagtttgtaaacattgatttgaatgatgacaacatttgcagtgtttgtaaactggaaacagacaaagaaacactctccttctgccacatttgttttgagctaaatattgagggggtaccaaagtctgatctcttgcacaccaaatcattaaggggccataaagactgctttgaaaaataccatttaattgcaaaccagggttgtcctcgatctaagctttcaaaaagtacttatgaagaagttaaaaccattttgagtaagaagataaactggattgtgcagtatgcacaaaataaggatctggattcagattctgaatgttctaaaaacccccagcatcatctgtttaatttcaggcataagccagaagaaaaattactcccacagtttgagtcccaagtaccaaaatattctgcaaaatggatagatggaagtgcaggtggcatctctaactgtacacaaagaattttggagtagagggaaaatacagactttggactttctatgttacaagattcaggtgccactttatgtcgtaacagtgtattgtggcctcatagtcacaaccaggcacagaaaaaagaagagacaatctctagtccagaggctaatgtccagacccagtatccacattacagcagagaggaattgaattcgatgactcttggtgaggtagagcaactgaatgcaaagctcctacagcaaatccaggaagtttttgaagagttacctcaccaagtgcaagaaaaagattctttggcctcacagctccatgtccgccacgttgccatcgaacagcttctgaagaactgttctaagttaccatgtctgcaagtagggcgaacaggaatgaagtcgcacctacccataaacaactgacctaaacagacttacttcgtatgccctgccctttattggtctcccagacatgcaaactttgaagaagtttgaagaaagttgtggtccgtttttttatggtcattaaatttgccaaacataaggcagtatttaacatctttgtcaaataaagcagatcattatactctagtcttctagggctaatcattttggctcatttggggactcttttttcccagaattactaaacaaattttatcacatgtgactacttaaatatactgttacagtgtcattttattaaacattttaattcacctgtcaaaacaacagattaactccttagtgtaaactactagagataatttttaagagggaaatggaattcatatcacctcttatttattatgagcaatattttaatataaaaattttatatgtgaaaatgctattttaggtactttgccattctatttataaatgtgtatttgagtggttctgtatatttatttacattatcatgtgtgaatatgttcacccatatttcaggtcactgcattttattctcttaatacaatgttttcacaacggttaccttgctttccaaagataaatatattttggattagaaatctgagttgttttaatttctaatacctcttataaaagaagaattaataactttttaaagcagtattcaggtaaatacaatacattattttgttttctaacaaaagcagttcttagttcaggaagaaaagactaatctggcttctatgtcaatttgtctccatagaaatgaaagcctcctcttgcttctttcattattagcttcacaccagtgactgtgatgcattagaatttggacagagtaagtcaagcctcacttccaattcaaatataatgtctatcttcaaattgagtgtgctgtgaaattgttctgtctttgaaaaaaaaaagtaagattattttgtgtgccactttgggtaaagtttcaagaatacttaaactgtccaaattgtattatcaccatcattgaacttagtgctcaaagaaagcattgtgaggtatttttctaaactttagactctatagagaaatataggattgttctacagaagaaaagcaaaactcctaattaaaaaaaaataaacctatgtattaagagaatgttctcgtaagttgcctatgatgcttccaaagagtttttatctaacagattgtgccaaacagctagataaattttaataatgtattacagtaaaggctataaccaatgcagaattaaaatgggctctaaattctgtttttaactcatgtttagaatgtacttatgaggtagatccttgcttgaaagtatctgctgaaaagcccagtaacgtggcagcttcatgcataaagatataaatgacatttgccttaaatttggcagcctaccctggcttgggtcagattttgttgttgaacacaagaaagtatttaagcaaagaaacacttcagtttaattgaaaacaactttttgtaatgctgacgtgttaaattggcctgagggtattaattgatatctgttgattttgtttttctttgaagtataacattactttttggagggaatttttgaaagatgctttcgatttctctcaattctttaagtcatgcaaaatgaatttaaaatccagggagtatggatgcattgccttagttttgatgagctttaaattaaatgtgtgcaatatcaaaatattcaaacttacaagctgggtaatacatttcctgattaatatcttagtgcttaattgttcccacgttttcaaatttgactttactcttttttggcgtaattcagtaagattgttaccagccagtgtgtttgcacacatttgggtttgtgtttagatgagttagggacagtcataaaagttggggatatgttgcatttgatatcaatggtagcatatttccagaatatgagccataagttgcagtcctgaatacaacagtgttatccaaagaaaggagttttctgacaaatatacatagctttgctaatgagtacggaacaagtggatgaacgtgtgcgtgtgctaaggtcttaagtgggactctgatttattccatttagatatttctacttaagctctaaaaaggagaggtgctcttaaaaaaaaaaactttgtggtgctggtactcacactactttatttggatgagttcctagtaaaaaaaactttttgttgaagtattttgcacagcagtttatccaaatgtttggtaaacttataatttagtcctatgttagttttcttaatcaaatatgcagttactgtgtatgcaaatataagtatcaggtacagagttctaacaagagaacatgaaatatcacaaatattgttttccacacttggctattctctacagttgttagtaatttttgagaatgttttgaagcatatctcatgtactactgtttaaaaagtggcaaaacagactgccagtcatccattactaaattttcagagcttatatgattaaggggagtgagataagacaaatctttttcacgttcagttttataatttgacacgttaaattgagttttaaaaattagaaaagtgtttttgaccacacaggttgttctctttaaagttcagccttatattgaagctaaaaatcaattatgttttactttgagattatcatcttatcctttgatcctcatattaatatctaaattagtcttttttaaaaggcatgcacttgagactccagtaatagatgattcaggcagcagaatagtgttttgttgtgtcgttgactatgcacaatggtggagcaaagacacattcttagtttttcaaaacacatgttcattttaccacaaagtgcccatttttatatacatttaaggattattttttcaatgtcaagttcatgttagtgatttcagaaatatagtcaaaatatatagtcaaatatatcttgacaggcatcttgagatttggtttttcattttactatatttatgactgaaaatggttttgtgttttctttatgttgtttatatattttttaccttagtgtttacactggtaaggcttgttagtccatttttgtagtttttttaaagtaaggttttagatctattcgtgttttaatgtttcccagtttgggttttgttttgttttggaagaatctgctttcattattaaattataaaatgtaaatgctctaaagtaggaatttttaaagagtaaattatttgtgtagcttattaggaggttcaggttagtgaccataaagtgggttacttgtacatgaaaatttgaaatggtaccatgtaaaattcttctattgtcaactttttctgatgtatgccagttcatttactgacaaatgttgttactaagtgcttattaagaagtgtaatacgctataaaaaagttaatactttttgttcagatgtaaggcaaagataattgatgccgtttcagtgtatgattgtattgttaacttttacgttggtgggagtaactatttgaggaaatttgtggtgagaattagtaagagataaaacccccaacagtttattcttaccaagtaaagttttgtggtcatggggcagggaagagtttatttaccagaatactagagccctcacacaaaataaaggtaacttggaagagggctataatgcttgcatctcagtattttcatttcacttcatcctttcataattgccttgattatggtgcagtctaacctattaagcaacttctggctatggtaacattgatatgaaccatattatatcaagtctccaaaacatctagtttgttaacatacactttccctgttctttttagtttgagtccacattactaatacattttaataatatttaattatttcacaattttaagtttaccaaagtaaacaaaaattcatgaagatgagtattgccctctcccaaaaaaggtttaaagattagttgaacttccctcaactacacctaaagcaaaggggaattttagtaagtgtgtgtaccttgtttctttcagacacatctagaatgtttttctttcaccgtacctccaaaagaggcaatttagaaagtattaagtagtgacttttgttcagtcccattttgtgtgtgtgtgtgtgtgtgtgtgtgtgtgttaaccttgctttaaaacagtagcatatactatggtcattgaacttaatctctctggcgttagaaatttactttacaaaattgtgttaagacttttggaaaaagaaaatgaaactgctgtggtaaaaaccaagtttgtttcaaaaaagtaggcaattatttggctgttacattttctttgaaaactgcaataatttatatatttgtattgctctgcttgggaactgtatatatgcttgtctactatttttaattttacaacaataaaataagtattttgtt

SEQ ID NO: 18173 - protein, 163 aa, Homo sapiens [sequence omitted]

SEQ ID NO: 18174 - DNA, 6045 bp, Homo sapiens
  CDS (364)..(954)
agaagggcgctgagaagggagctggaaggaaaagaaggaaacattccttcctcaactggaggaagacacgcggccacacacagaaccagcggccccaggaccgtcaccctgcgtgcccgggcctgtccctcctgaccccaggattatagtggcgaggcagggtgttagccaagcggattgagccaggacacagcaccgcggagccctgcaggcgagtcctccggaggctgagagcaaacggctgcactaggaacccagcagtcagaccggcccccaccctggagtgaacacatcgccactgccaggcatcgcagggaggattaccccaatggcacctagctgggcgacgagaacaaccccgagatgcgggtgcactgcgccatcatcccctccgacatgctgcacatcagcaccaactgccgcacggccgaggagatggtgctcacgctgctggactacctcttccaccacgaggtgcaggctgtgtccagcctctcggggcagggcaagcacgggaagaagcagctggacccgctcaccatctatggcatccggtgtcaccttttctataaatttggcatcacagaatctgactggtaccgaatcaagcagagcatcgactccaagtgccgcacggcgtggcggcgcaagcagtggggccagagcctggtggtcaagagcttctcgcggagaatgcccaactcatcctcctactgcccctcagagccgatgatgagcaccccacctcctgccagagagctcctgcagccacagctgcagccgcaggccctgcactacgcgctggccaacgtgcagcaggtgcagatccaccagatcggagaagacggacaggtgcaagtaatcccacagggacacctccacatcgccaaggtgccacagggggagcaagtccagatcacgcaggacagcgaaagcccgtgttctggtactacgtgaaggaggtcctcaacaagcacgagctgcaagcgcttctactccctgcgccacatcgcctcagacgtgggccggggccgcacctggctgcgctgtgccctcaacgaacactccctggagcgctacctgcacatgctcctggccgaccgctgcaggctcagtactttttatgaagactggtcttttgtgatggatgaagagaggtccagtatgcttcctaccatggcagcaggtccgaactccatactctttgcgattaacattgacaacaaggatttgaacgggcagagtaagtttgctcccaccgtttcagacctcttaaaggagtcaacgcagaatgtgaccttgctgaaggagtccacgcaaggagtgagcagcgtgttcagggagatcacagcctcctctgccatctccatcctcatcaaacctgaacaggagaccgaccccttgcccgtcgtgtccaggaatgtcagtgctgatgccaaatgcaaaaaggagcggaagaagaaaaagcaagtgaccaacattatctcatttgatgatgaggaagatgagcagaactctggggacatgtttaaaaagacacctggggcaggggagagctcagaggacaactccgaccactcctctgtcaatatcatgtccgcctttgaaagccccttcgggcgaaactccaatggaagtcagagcagcaactcgtggaaaattgattccctgtctttgaacagggagtttgggtaccagaagcttgatgtgaaaagcatcgatgatgaagatgtggatgaaaacgaagatgacgtgtatggaaactcatcaggacggaagcacaggggccactcagagtcgcccgagaaaaacggagcacactctgtcacccaggctggagtgcaatggcacggtctcggctcactgcaacctctgcctcccgggttcgggtggttctactgcctcggcctcccgtgtagctgggattacaggcgcgcaccagcacacccgactaatttttgtatttttagtggggacggggtttcaccatgttggccaggctggtcttgcactcctgacctcacgtgatctgccccaccttggcctcccaaggtgctgggattacagggtctcgctctgtcgcacagtctggagtgcagtggcgtgatctcggcccactaaaacctccacctcctgaatctaggcaattctcctgtctcggcctcctgagtagctgggactgcgggctcacaccaccatgcccggctaatttttgtgtttttagtggggacggggttttgccatattggtcaggctggtcttgaagtcctggcctcaggtgatccaccagcctcagcctcccaaaatgctgggattacgggcatgagtcaccatgcccagcctaaacttggcaagataataaataacctttttaagtgtcgttgggcacttgtctggttgtttttctttaggttaccatgccagcaatgattccttttgagtttctgacagaagatagtggttttcatccaaataagtcaactactctaccccatccctaagccacttgtatggaaagaaaaagaggaagaagccagtactgtgactgcataagcttcccccagcatcacccgctatgagatgtgtggcagctgagacccgggaactgctcaagggcaccaggccccatctgtctgcactcactcaccttcctcaggtactcgcatgggcatgtcactgacttcacgtgctgctgcagctccttggtgagctggccctggtcatgggacaggaactgtggggtcaggacaatagagagcttcaccatttgcagaatgagaacaggggctcatgatgagtgccaacctattagataatttaaaaaaaaagtgttgaatgagtggaaaaacaaggtgatgtttgagtctatagtggtcaagggcttcagaaaaggacagaaccaagttcaaattcctgtactttgaatttctacttcatgccatgcaaaattactttaccccttttaacctcagttttcttctgtgtgaaacaggaacaatagtttcattcgtcattcagtttctctcaaggtttcacgagatcatacctataaaacatccaagtcatttaaatgtatcatcatttctgtcataattagtgggatccatttcactattattggatatacagttctgtgcctgaaacctacaaaaaaagaaaatgttaagtctaaaaagcattagtgatttctcatttttatattactaattataaccctatttaatcacacaaggccttgtccgtggcaggtgctcaataaacacttgtcgaatcaatgcatgtgggctccggagccacactgtttagattctattctgcctccaccacttatcagctgtgtggtctgggtaagataattcacctctttatgtctgcacttccctctccataaactatatataatgagaatccttagctcattcggttgtggtgaggggtgaatgatttggcacacaggaggggcttgttaaacattagctgtgatgatctccttccaaatcttcattttcagagccacagatgaggccatagtgcaaccaggtgaccttagagtgtaagtacacatgatcgccagctatgctctgtctccaccataggtccaagactgggtagttccggcctggaggtttctgctgcatctgccttctcagtgctcacctaagggcttttgtattttcctcctcgcatccccacagatggggttcaggctgccggacacagctgggtgatgccagggcagtggtcacctgtgccagccctgtgaggtagctggaggatcattgttccttccttctcgggctctgggcagatgccagggctggggtgacccatgccctcaagtttcttgctttggtgggccacattttcccttggcaaagagggtaaaggtcacaggatgccagagagctgtgacttctctgtgccctgggcccaaactatgaagacctgacacactatgctaaaagtccaaggccgggtgctccccagagcttcttgcctcaccgcttctgctgagggaggaatgaatactatgtcctcccagagctttgggagcttgtagcaagcagcctccccagtacaaaatctcttggaaacctctaactgtgtctgaaacattagtgcaaatgttgcatcatatttcccatatgtccgcatgttttaggaaaaaaccctcaatttcctaaatatgcaagaaaaatcgatattgtaggacaatgtgactttttaaaaaatgttatttaaaaatcttccccacctccttttctgccctccaagactgccaaatacttgttgaacaaatattattaaaagcctactacgtgccagccatgattcatggtcttggggacacagcagagaacaaactgacaggattcctctcttatgcaactcacattcttatacgataatgataagggttaacattaattaagccgtcaccacgtgttagtcacggtgcagtcattcccacacattattacacttaaacctgctagcaagcttgcaaggtagttagttgtttttcctttaaaaactgagtctcggaatgatgaagcattctgtccaatgtcacacggctagtaagtgtggagaccttgcatccaatcaatgcccgtctcattctaaaggccatgttatgtgttctccagcccatggagaataattttaacacagtcaatgaaatttctacacaacaatgttcttgtttcaagtccaagaatgcctcctacacctcctataatactggctttctggtgagtaaagatggcattctcatgtgtaatcaggtggcaaatggagatatgaccaaagtaaccatctgcctacactcataaccctgtacacactcttcctgtgtcgattcaattcaagtaccccttttgatcacttagcaaatctgacctttaaaagggttaaggtttttatatccatgtaagtttctgtattgctttggaagtctctggttaaattaatactcttttaatagtgacctgtgattctgttttgatcaagtgttttcaaacttgacgtctttgatgggtttctccagtgtcaaaatcctaaatcaagtctttttggcttaaaactaactttgggattttttcagctgcatcccttggggagtctaaagaatgtatctctcatcttgtagaggtattaagtgattcgatttatttggtagattaaatgggcaggcattgtcaaatgtggcgatactgcatgggagggcactgtcaagtgaggtgacattagatctcatctcagttatatttatgggtatgttgttgatatacgtgttccaaaaattgcatacatttatacaaatttaatatgatttgtaattttgatagttatgctaaatgtttgctaaagttatatttgtataaacacgtcatgaatggctgggcaccgtcactcatgcctgtaatcccagcactttgggagacaaaggcaggtagatcacctgaggtcgggagttccagaccagcctaatggagtgaaaccctgtctccactaaaaatacaaaagttggccatgcctggtggcacatgcctgtggtctcagctactcgggaggctgagacaggagaattgcttgaacccgggaggcggaggttgcagtgagccgagatcatgccactgcactcccgcctgggtgacagaggtagaatctaactaaaaaaaaaaaaaagttattaattatttctgaagattgtatgaaatttataaaagtctggtggccctgatatgatgctgccagtcatgattctgattactgtcttaaaatgctgcacgtaagtaattaaatttccttgtgaactgggaagtttcatcagacttctatcataactattgtttccatcatccacagttactattttgaattcttctctaaaaatatttgtaattggcaatagtccaaattttcttttgttttctttcctgtttttgagacacagtctggctctgttgcctaagctggagtgcagtgagccgagatcatgccactgcactcccgcctgggtgacagaggtagaatctaact

SEQ ID NO: 18175 - protein, 197 aa, Homo sapiens [sequence omitted]

SEQ ID NO: 18176 - DNA, 5255 bp, Homo sapiens
  CDS (958)..(2088)
ctatcgaatccacttttgttcgcatcaaagaaactccttctgaacaggagagcaaagtcttcgttctgactgaaaatggggagcgtacctacactgttaaccatgaaaccagccacccaccaccctccaaagtctttgtctgtgacaagcccgagagcatgaaggaattccgcctggatggtgtttccagccatgcgctgtcagacagctccaccgagttcatgcaccagattattgaccaggtcctgcaagggggcccaggtaagaccagcgacatcagtgagccatctccagaatcctccattttatcatccagaaaggagaacgggaggtccaactctttgccgatcaagaaaacagttcactttgaggctgacacctacaaggatcctttctgcagtaagaacctgtccctttgctttgaagggagcccaagagtggcaaaggaatcattgaggcaggatggacatgtcttggcagttgaggttgctgaggaaaaggaacagaaacaggaatcctcgaagattccagaatcctcctctgacaaggtcgctggtgacatttttttggtggagggcacaaacaataattctcagtcttcttcctgtaatggtgctttagagagtacagcccgccacgatgaagaaagtcactctctttcacccccaggagaaaatactgtgatggccgattccttccagatcaaggttaacctgatgactgtagaagctttagaggagggagactattttgaagccatcccattaaaagcctcaaaatttaacagcgacctaatagattttgcttctaccagccaggctttcaacaaagttccttcacctcatgagacaaaacctgacgaggatgctgaggcttttgagaatcatgctgaaaaactaggtaaggagtattaaatctgctcacaaaaagaaggattcgccagagcctcaagttaagatggacaaacatgaacctcatcaggactccggagaagaagctgaaggctgtccttcatccccagaagagacaccagtggataaaaagccagaggtgcatgaaaaggccaagagaaagtccacccgtcctcattatgaggaagagggagaagacgatgacctccagggtgtgggcgaggaattatcttccagccccccaagcagctgtgtcagcttggagacccttgggagtcacagcgaagaaggcctggatttcaagccctccccacccctctcaaaggtttccgtcattccccacgacctcttctatttcccacactatgaggttcccctggctgcagttttggaggcttatgtagaagacccggaggatctaaaaaatgaagaaatggatctcgaagagccagagggctatatgccagacctggactccagggaggaggaggccgatggctctcagagcagctccagttcctcggtgccaggagagagcctccccagtgccagcgaccaggtgctgtatctcagcaggggtggtgtgggtaccacaccagcctcagaacccgctccactggccccccatgaggaccaccagcaaagggagaccaaagagaatgaccccatggacagccatcagtcccaggaatccccaaacctggaaaacatagcaaaccccctagaagaaaatgtaacgaaagaatcaatcagtagtaaaaaaaaggaaaaaaggaaacatgtggaccacgtagaaagttcactatttgtagcaccaggaagtgttcaatcctcagatgacctagaagaagacagtagcgactacagcattccttccaggactagtcacagtgactccagcatttaccttcgacgacatactcataggtcttcggaatcggatcattttagctatgttcagttgaggaacgcagcagatctggatgacagaagaaaccgaatattaaccaggaaggccaacagctcaggagaagccatgtcactggggagccacagcccgcagagtgactccctgacacagcttgtccagcagccggatatgatgtattttattctcttcctgtggctcctggtgtactgcttgctgctcttcccacaactggatgttagcaggctctgatacgtgtgtctggataataaaaaagacaggaccctgaccaggggcggggttacttcattttattttgggttctgggtggggcacttctacagacagttgaggacctccgaggaaacttagaccccctttctcgctattgtggttttttttttttttcaggtttcctttttttttctggacaacctgagcatgcttttttctttggctgtgtactcaaaactcaggcatgcagctggatccgtaggtggggttttgtccttgtgtgccttgctgggttggatagggagcattgttagtgatcattagcccgcctggatcttagcacaccccacattgcaggttcacacgctggatgaacttgagtttcttacctctcagatgaagggctgcttaatgagaaagagggtgggcaccccaggccaagccccagctggggagagagctgccacgttttcctccaagcgtgggtgtttgagagaaggtgctggggtccatgcacctgtcgcagtccggtaactggttgcattcactaggggaaatccgagcagccagctctgtgtaagcacatccaggaatggcagaatccagggaggaaggtgaaagctgtgttgagagccactgtgtgctctttttcaccctgttttttttgttgtttttttgttttgttttttgtttgaggggagataacacttgaaattcagttttccattgattggattgagatagaaccatgattttcaaaccagatcgccagggcccagcagggccatataaaagccatgaggagtggctgggctggaatcagctcccagcagtgctggagctgggtggtggggtagcttcctgcccactaaagctttggtgcacacctccctcagaatgcatgtcttggaacgggcattctttgtggtcacttgtaatgggtttcttgaagaggctttctggacagcactccgggagcaggccagcacaggaggtttgtgaaagaagagaggcatctctagcacccctgcccccagtcttcctcagccccaggctccctctgctctctcctccctgccaagactcaggtccgtggtgagtctctgcattggttcctcctccccttgctctccccttcagaaagcatgtaccaggcaacccttataaaatcacaaatgagtcaggaggggactcagtgagcatcttgtctagctggacccagagagacagagcagcttgaccaagatcatatagccgaccaggggcagacttgcagtgagcacacaggcacctgatgccctgtccagagctgtcaccccttgtaggaaacttccactgggcacaccaatgtcctgagaaaaagataaaatgactagattaaaatgtccacattcaagcaaaaccaaaaagtttagaccaactatcgacatttgttttgttcttgtatttttcccatgaggaattcttactcaccttcaagctcatccccaattccttctgaaatacccttgacagctgcaacagcttgtcatttgacataccagcgtcgctcttactccaggaatcacgtttctttatttgctagccaaggacttgctcatttcaagcagtgggtttcaagtttacagaattccagcatggccagaagaatttacatagcacatctgagtcgatgacagccaaaatctggcctctaaaccagtctgattatagtctgtctcccctcctgaaagaatttcagccttccaaccagaaagctgctgggagcttggagtgattcaatctggaaggccaagagccccatggaaaatgagctaattaatgagctccctggcatcaatgaaagctcaaaggtacagataataaagattatgtgatagtttataactctgggcaccatgcagtccttgcctaaattagatgctcgaagagcctgggaagagccaacccaaatgtgaatcatttcattttatgggtctagaccttgttcagaaaaacctctgcaagatacttctctcacctattacaacttgtaatattgtttaaaacatctactggcaagatgcctgaaagtcatttggttcaggttggcagtcaactgatattttgcaaaggaaaaaaaaatctcatttgagtataggcttctatggaagaagctggatatagaaaatggatgtggaagtctgcaggacaaaccaccccattgcttgtaaattttttttaaattaaaagaaatacaataaggcttttaacaagaactagcagtcccctaagtctcgctgcttagaagtaaccactttcaactctcttatgtttgcatttctacataacgtgcttacactttattttttaatttagaaacatctactggcttgctgtcacagtagaggaggatttcactcttaccataccgtgctttggttttccagtatagctagatcacatcatttagtacatttctattaggtgttgacattacctggagcacttaaggattgttgactcccaagcccagcagtgtgttatggttacatgtcctttctcctccaaatgtccccattaatttgctattctctctctttactttttttttttttggtgtggcacattctttaataacttcctgaggaagagaacatgggaagtaaatatggttgtaaatattttgagatttttgcatgacttaagatgtctgtattctgcccttaacagaaatgtggctgagcatagaatgacaggtggaaaataataccctcccctagcccctcccaagcgtgctggttgagatttctgatgccattctgattcccgtacctttatatgtgacttaggtttttttatccacccttcctggaaacatttaagatctctttattcttggtgttctgaactgtcatgatggtgttgtatcccgggtgttaaaccttgtgctgggccttcatgggaaatttcttaaattttcttgtgattatttacattctttctttctggaccacctattatttcaatgttggaccctcccctacacccaggctgatgctctaatattttttatcttttctatttttcgtctatgtttctgatctgctttcaggaagaattattcatttttatcttcccaatctgaatgttttattgaatttttattttccaagttaataaaacctttggttattatcctg

SEQ ID NO: 18177 - protein, 377 aa, Homo sapiens [sequence omitted]

SEQ ID NO: 18178 - DNA, 6232 bp, Homo sapiens
  CDS (4550)..(5104)
caaaaaatgagcattattttagcaacacaatcctgacactatgagagggagaaaactgggttggatcaagtattcatcttacccagtaagccattataactcaggcttttgatgcatattttgggctgttattcatcaaggtggtcaaagtcatgaagaactgtatgttattctataatatactttctatattaagtctgttcagatgataccacattttctacatcactgatccattaaaaaaaaatctttctttgaatgcctcttgccactaatcaggctatgatattcagtttttgagataggttaacaaattgaaaacccagctttaaatgttatggtagtttaaaaatagaagtgttttacttcaaactattctgagttgctgcttagagcaataaaaatgtactttatagcttgttaacctagatctcagggatatccgttctacaataatggaagtagatttgtttactgtctaaatcagccttgtcagaacaatgctctccagtgactttttaaagtcagagtaaaccaatacattctgtcttctgtgattatacagcatggcatggtgttctcttgtatacttgtgttttgaatatgagtaacagtctttagctgactttagcattttggagaaatctgtatatgtggcttctacttatataagcatctaccaaatatattaactgagttttatagtccggttattttccatttcagttacttccaagactcttcgatatgcacttacatacttcatactcattaaatgaagatattggaagctaccttattttgaggtacagcataaagcaccagcagagcttagttactacacattttagcacaatctcctgtaagttactgcatgctgcaaaagagctgaatgagtcaacagacattgtaatggtgatgtgtaactcataacttgaaataaactatgtcaaatcgattagaaaggtctgagcacatctggaaaattggcaggtaatttagaaagaaatgactagttattaagaactcaggccagttaaactgggagattaaaatgtattacattgagagactattgccatcaattgccatttgttattgaagataaaatgcagcctagttttgagactcaagtgatgaacccttcccatgggttctttctacctttctactggtcctcaaaaacaagttaaagcaaaaaagatttaagtgataaaatgtgtttatgcctcttggatgtatacttttttttaatctaaggaagaaaccttatgatatgatatgatgaaaccatcctctctggattctaatcctaagtaaatactgaccagctgcattaagaaattttctgtttttttctccagatcttcaaatgctccattaaaaaaagaaagtttgttctagtgttttcccatcagcatttacctactcttatgtaccttcaccacaatcagaactgttttccagcccaaacttggcctccaggccctcactgcactagagccagcccctcctaatggtttcgctcacactcagcgccttagcttcccctcctcagggtcacttggagaaggaaatacttctgcctctttgtaccacctcctgccagaaaggagaccccgcactgtacctgattctttgggtcataggaacagcatgtgccccacgtgggcattctcctcagtctttatatcacataccctgtgaatcagcatgctggggtaggaccccagggtggaaactgttgaaagccgtccagcaggcaatgaggtatgctctaccctggaggcctggtaaccttcacgacccccttgagcttcaagtctctgtggctgatggttttaatgataggagcccagaaagggaggcagcttccacccagctgcacccctcgaggtcttgtgctccctgaccgggccatcagctacatccttttgcaaagcagccatcagcttatgatggggtcttgctaagctgagtgcctgctccaggaaagccttgtgatgctcatacgtggtccgatacttgtatttggggtgagccagcttaggtttaacgactaaaggacaggaagagcccggcaagccttgcttgtgaaatggacacggtatatccaggaacacacccagtctgaccccagcagcactgcactttacatggaaagttagcagctatccattattcatttcaactgcaatgctattgcagtcaggcagtgcagagagacagcagttttcccttatccaggtgatcttgagaaggggaagttgaggcactaagtagaaggaaaacccttagggaaggttggctctaaagagcaggaaatttatccctccctcatgcacctgaagcaagctggtgctcagtgggacccacaattcatagaagttccctaaatgcctgggcctggttcagtgatgatttggctgagccgagacctgggagtgctctctggcttgctgcagccattccatctcagctccaatgagacagggccaaagatggacctgattctccacccaatgggcagaactcaaggccattctcagctatatctgctacttcccttggtaatccctgttacattcttcccaactcttaggctgttgccaatggtctagctatttggtttgccacctgaaaaaaccagacaagcagataaaggcacctctttggggggctgtagaccatggaaacaaatcatgcatggaaccatgtgggtcactcaggtacaagcccacagtgtggacctgtttcgatgagaccaactagaatgagctgctgatccagatggcactggccacataaccaccaggctgcctgagtttaccttcatactgggcattgcagcacatcccccatcacaacatgagcacaaaggaaacccagtttctgacacagagctgccactcactgcatgcaggtgttttatagtccggttatcttctgtttcagttggtgtctcaggaggccacacttccctgggcaaggccccccctgctcctggaagactgactacgttggacccctgacctccactcagggctgacactgttccaggctatgttgttactgtcccagtctggtcagccaacttcagccacaccaccagtccgcttggttcttactttctgtttgcagtctgacaatggaacaccttttgtcaaggaaaccactcaggagtggacagatgaccttccatgccattgccatccacaggcaccaggcattgttgagcactggatcagtctcttcaaaaactgactcaaagacatctgactttggtctcctcctggtcacacgcttgactaagacacgttgttcactgaatgtagctgttccagaaagggaccatcttttcttggctgcttcttgagtaatgaccagaatgaaggggcaaggaatcatctagatctattttgaaaatttgataacctttcctgatcattcctggacatgaggcttctctctctaccctaacaactcccccaggcccacgtggttagtgcacccccgtgagcccagcgcgttctagtctaattctgatgcgaccacctggatgctcatgccgcattaccatggactgagataggtgggacagggaccactggctgagagctccgccccctgacccccctacagtggttcacacaggccaaaatggtggccgtgacaggcctctgtagactttattaaaatcctctgtgcctcttgcacctgactgtccagatggaaagtcgggagtgagcaggggcatggggagcaaagtaaagctccagccactgacatagggcacactaattttattccagtggagggagaagaaccacctcagcctcaggagcctcggcccacaccccagagaagaaccacctcagcctcaggagcctcggcccacaccccagagaagaaccacctcagcctcaagagcctcggcccacaccccggagaagaaccacctcagcctcaggagcctcggcccacatcccggagaaccacgtcagcctcaggagcctcggcccacacccctctacctccactaagaggtaagcggggtgggggctatgaatgacctttctcctttactgtcatccctggtgtctgtcttccttgtgaaggaaaataacttggtgccgctcacccaaactattacaagcaccttaactgactgctggctctcacatcgtcaccaggcagctctgaacacagctggactgccattgcccttaacttaccgagaaatttttggaaacagcaggggagggcctcggctcgactggcagtgtggacagacagggcagggtaaatggatggctctcaaagagtctctccaaagccgagaaggacttcacccagttgctcaaactgaactggaaacagtgcgttttaccagcagatcaggaggctacattgtagtgattgtcaaagtgcacttctcagttcacactggtcccaacagtcaaggaagcccaacttgggggtgccagcaagtgtaacccacactctgttttcagaggcaccacgcgtgccccagacctacactccttgtatgggagggagtcaggtactaagttgcttttcttccccaaaacgtgctttcctttccccttacaccttatggattctcttgagaatggaagtcgacaccatcgatagaccgtgcagcactccgacggctatgcagatcgaaaacagagccgccgtgcttaccctcaccctgtgggcagtcagatatgatgggaatcacccagttagaaagatggcatggaatctgtccctgacttcaaatgaagtaatcaatggtattgccctggaaggcaagcaagtcagcctccactcaccagcgagagttgtcagggatggtagcattgccccagactcactcttagtggcacaatcaaacacgaactcagtcattcataccttgggacgtaaagaaatgacagtgaatggcagtaacaaaggcacaccacagcaagggacccaagctcggcgcaccattgtcctttttcattctggttttgctgagctgctgttgcttggccttgcacaaatgctgactgggagtagtctgagacctggagtgggacacacgtccttcccatgactaaaactgctgatgaatatgataatatttctacactagcctccctcaagcccagaaccatgatctggaacagcatttgcatggagcaccaaattacaggccttaatccaacaagtatttcttgattatatgacttgattccaggttagacagatggaaaaatgctgataaatataaaacatgtcttgctctctaaaaaattatagtttggttgcaaaagtaagaccaagttgactaagatataatggtcttttgtatcattatgtgatcatttgatcattgtatcattatttgatcaccaaattatatggggccaaaaataacacaaaattgggaaagagattgtaatcactgagggatgaaaaaaggcagtcaggttttgaaaaagagctctatttgggtgcacgccgagcctgcctgactgtctacaaatgaaaatcaggccaatgcctgtggcctgcaaggcttctcgatattctaaggtgacatggattgcatgttattatgcaatttttaaaaaaatggtagagcctctggatgaacgtgttataattaggtttccttttgttgatttggaactctttctgttcattgctgtgtgaaacacgcttgtggaaggaattatgccagctttgcatagtgtgcatttttagagagaacattttcattgaaacagaatcagaaatgtaacaacgagttgggtagaaatttgtcatgattcttgttggcatatattattgttgctaaaggcatttattaaacttaatgaaagtgttcattaagaacactgaagattataatgctgacaaaaacaccaaaaaaagtcattctactacattgaagattaaaaataaataagctaccccatcaaaccaaataaactataacttttaggtaattataaaatacaacttcacctgcctgggcaacatggtgagatccccgtctctacccccccgcccccaaaaaaaaatttagccatgtgtggtggcatgcgactgtgatctcagctactctggaggctgagaagggaagatggcttgagcccaggaggtcagggctgcagtgagcagtgttcgtgccaccgcactccagtctgggtgacagagtgagactctctctctc

SEQ ID NO: 18179 - protein, 185 aa, Homo sapiens [sequence omitted]

SEQ ID NO: 18180 - DNA, 4828 bp, Homo sapiens
  CDS (115)..(3657)
cactgttcctacagcaatcggtcagttgtgggagtgcttgtccactaccagaaaagacacccagaaataaaggttactgccaaatatatcagacaggctcctcccacagctgcaatgatgagaggggtcgaagggccccaaggctccccccggccacccgcccccatacaacagctgaaccgaagcagctctgagagagatggccctcctgtggagaatgagatgttcttttgccagcactgtgattatgggaaccggacggtcaaaggggtactcattcattatcagaagaagcaccgagacttcaaggccaatgcagatgtgatccggcagcatacggccaccattcgaagcctctgcgaccgaaatcggaagaagcctgccagctgcgtgcttatctccccctctaatctggagcgggacaaaacgaaactccgagcactcaaatgtaggcagtgctcatatacctccccctacttctatgcactgaggaagcatatcaagaaagaccaccccgccctgaaagccacagtcacgtccatcatgcgatgggcatttctagatggcttgatagaagctggctaccactgcgagtggtgcatctactcccatacggagcccaacggtttgctcctgcattaccgacggaggcatccagaacactatgttgattacacctacatggctactaaactgtgggctgggccagacccatcccctccctctctcacaatgccagccgaagccaaaacctacagatgcagggactgtgttttcgaagctgtttccatctgggacatcactaatcactaccaagcattccacccctgggccatgaatggtgatgagtcagtgctactggacatcatcaaggagaaagatgctgtggagaagcccattctttcatccgaagagttgacaggccctgtgaattgtgcaaacagtatacccacccctttcccggagcaggaagctgaatgtccagaggatgcaagactgtcccctgagaaaagcctgcagctagcttcagccaaccccgccatatcctccaccccataccagtgcacggtatgccaatctgagtataacaacttgcacggccttctcactcattatgggaagaagcaccctggcatgaaagtgaaggctgctgactttgcccaggacattgacatcaacccaggtgccgtctacaaatgcaggcattgcccatacatcaacacccgcatccacggcgtactgacccactaccagaagcgacacccgtccatcaaggtgaccgctgaggactttgtgcacgacgtagagcagtctgctgacatatcccagaatgacgtggaggagacgagcaggatcttcaagcaagggtatggcgcctaccggtgcaaactgtgtccgtacacacacggcactttggagaaactaaaaatccactacgagaagtatcacaatcagcctgaatttgatgtcttttcccagtcgcccccgaagctgccagtccccctcgagcccgagatgaccactgaagtgagcccttcccaagtctccatcactgaggaggaggtgggagaggagcccgtgtccacttctcacttctctacctcccacctggtctcccacactgtgttccggtgccagctctgcaagtacttctgctccacgaggaaggggatcgccaggcactaccgcatcaagcacaataatgtccgagcccagccagaaggcaagaacaacctcttcaagtgtgccctgtgtgcctacaccaaccccatccgcaaaggtctggcagcccactaccagaagcgccacgacattgatgcgtattacactcactgcttggcagcctccaggaccatcagcgacaagcccaacaaagtgatcatcccatccccgcccaaggacgactcccctcagctgagcgaggaactccggcgggcagtggagaagaaaaagtgctccttgtgctctttccagtcgttcagcaagaagggcatcgtgtcccattacatgaaacgccacccaggggtgttcccaaagaagcagcacgccagcaagttggggggctacttcacggccgtctatgcagatgagcatgagaagcccacactgatggaagaagaggagagaggcaactttgagaaagccgaggtggagggtgaagctcaggaaatcgagtggctcccattccgctgcatcaaatgcttcaagctgtcctttagcactgcagagctgctgtgcatgcattacactgaccaccacagtcgggacctaaagagggacttcatcatactgggcaacggcccccgcttgcagaactccacctaccagtgtaagcactgtgatagcaaactgcaaagcacagccgagctgacctcacacttgaacattcacaatgaggaattccagaagcgtgccaaacgtcaggagaggaggaaacagcttttgagcaagcaggaatatgcagatggtgcttttgcagatttcaaacaagagaggccttttggtcacttagaagaggtgccaaagatcaaggagaggaaagtggtgggctacaaatgtaaattctgtgtggaagtgcacccaacgctccgagccatctgcaatcacctccgaaagcacgtccagtatggcaatgtcccagctgtgtcagctgctgtgaaggaggcggatgaccctgcccacttattcctggatggattggaagcagccaaagacgcaagtggcgccctggtgggccgggtggatggtgaacactgcttgcttgatggaatgttggaggatgaaacccggccggggggataccattgcagtcaatgtgacagagtcctgatgtccatgcaggggctgcgttctcatgagaggagccacctggccctggccatgtttacccgcgaggacaagtacagctgccagtatagctcgtttgtttctgctttcaggcacaatttggatcgccatatgcaaacccaccacggacaccataaaccattccgatgcaaactctgctccttcaagtcctcctataacagccggctgaaaacacatatactcaaagctcatgctggtgagcatgcctacaagtgttcttggtgctcattctccaccatgacaatcagccagctgaaggaacactccctcaaggtccacggaaaagccctgaccctccccaggccacggatcgtcagtctcctctcctcacactcccaccactcctcccaaaaagctaccccggctgaagaagtggaagactccaatgactcatcatattcagagcccccagatgttcagcagcagttgaaccactatcagtcagctgccctggcaaggaacaacagccgtgttagccctgtgcctctttctggggctgctgctggcactgagcagaaaactgaagccgtgcttcactgcgaattctgtgaattctcctccggctacatccagagcatcaggcgtcattaccgggacaagcatggtgggaagaagcttttcaagtgcaaagactgctccttttacacaggctttaaatctgcttttactatgcacgtggaagctgggcactcagcagttcccgaggagggccccaaagatcttcgctgtcctctctgcctctatcacaccaaatacaagcgcaacatgattgaccacatcgtgctgcactgagaagagcgtgttgtccccattgaagtttgccggtccaaactgtccaaatacttgcagggagtagttttccgctgtgataagtgtaccttcacctgctccagtgatgagagcctccagcaacatatagaaaagcacaatgaactgaaaccttacaaatgccagctctgctactatgagaccaagcacacggaggaactggacagccaccttcgggatgagcataaggtaagccgtaactttgagctggttggacgggttaacttggatcagctggaacagatgaaggagaaaatggagagctccagcagcgatgatgaggacaaggaagaagaaatgaacagcaaggctgaagacagagagctgatgagattttctgaccacggggctgctcttaacactgagaagcgttttccatgtgaattttgtggacgggcgttttcacagggctctgagtgggaaagacatgtgctgagacacggcatggcattgaatgacaccaagcaggtgagcagagaagaaatccacccaaaagagatcatggagaacagtgttaaaatgccctccatagaggaaaaggaagatgacgaggccattgggatagacttttccctaaagaatgaaacagtagccatctgtgtagtaactgccgacaaatctctcctggagaatgcagaggccaaaaaagaatgagcgtttggtgaaattcttaatcaaaccttacttgaacagtgatgaaaaagtgggagggctggctttggctgagaagggagggacagaaaagagaagacagaacaaagctgctttttaggactgaacaatctattttcaaagcactggtacctgtgtgagtgagtatgtaaattaaagttatttaaatggttggaatatgtggctccttttccatcactacatcttttcttccggatcttcatcatggaagtttcatttgttgcggaatatggaagcacctcccaatggtacggtgcaccctgtggtggtcttggacagtatgtggaaacagaagctccatgacggtagaagacttctcattggggagcaacttttttacgcacaacttttggtgcgtttttctagttttaataccttaagctttttcaagacctaactgcagccgctttgggaaaaaaaaacaaaaaacaaaaaacag

SEQ ID NO: 18181 - protein, 1181 aa, Homo sapiens
MMRGVEGPQGSPRPPAPIQQLNRSSSERDGPPVENEMFFCQHCDYGNRTVKGVLIHYQKKHRDFKANADVIRQHTATIRSLCDRNRKKPASCVLISPSNLERDKTKLRALKCRQCSYTSPYFYALRKHIKKDHPALKATVTSIMRWAFLDGLIEAGYHCEWCIYSHTEPNGLLLHYRRRHPEHYVDYTYMATKLWAGPDPSPPSLTMPAEAKTYRCRDCVFEAVSIWDITNHYQAFHPWAMNGDESVLLDIIKEKDAVEKPILSSEELTGPVNCANSIPTPFPEQEAECPEDARLSPEKSLQLASANPAISSTPYQCTVCQSEYNNLHGLLTHYGKKHPGMKVKAADFAQDIDINPGAVYKCRHCPYINTRIHGVLTHYQKRHPSIKVTAEDFVHDVEQSADISQNDVEETSRIFKQGYGAYRCKLCPYTHGTLEKLKIHYEKYHNQPEFDVFSQSPPKLPVPLEPEMTTEVSPSQVSITEEEVGEEPVSTSHFSTSHLVSHTVFRCQLCKYFCSTRKGIARHYRIKHNNVRAQPEGKNNLFKCALCAYTNPIRKGLAAHYQKRHDIDAYYTHCLAASRTISDKPNKVIIPSPPKDDSPQLSEELRRAVEKKKCSLCSFQSFSKKGIVSHYMKRHPGVFPKKQHASKLGGYFTAVYADEHEKPTLMEEEERGNFEKAEVEGEAQEIEWLPFRCIKCFKLSFSTAELLCMHYTDHHSRDLKRDFIILGNGPRLQNSTYQCKHCDSKLQSTAELTSHLNIHNEEFQKRAKRQERRKQLLSKQEYADGAFADFKQERPFGHLEEVPKIKERKVVGYKCKFCVEVHPTLRAICNHLRKHVQYGNVPAVSAAVKEADDPAHLFLDGLEAAKDASGALVGRVDGEHCLLDGMLEDETRPGGYHCSQCDRVLMSMQGLRSHERSHLALAMFTREDKYSCQYSSFVSAFRHNLDRHMQTHHGHHKPFRCKLCSFKSSYNSRLKTHILKAHAGEHAYKCSWCSFSTMTISQLKEHSLKVHGKALTLPRPRIVSLLSSHSHHSSQKATPAEEVEDSNDSSYSEPPDVQQQLNHYQSAALARNNSRVSPVPLSGAAAGTEQKTEAVLHCEFCEFSSGYIQSIRRHYRDKHGGKKLFKCKDCSFYTGFKSAFTMHVEAGHSAVPEEGPKDLRCPLCLYHTKYKRNMIDHIVLH

SEQ ID NO: 18182 - DNA, 5796 bp, Homo sapiens
  CDS (364)..(5544)
ttatctactgtatctcacactactacttcagggattttgaactctgctccccactcctccagcacctcacacctccatcaccccagcgtggcctacgactgtctctggaactactcacagtacccatctgccaatcctggcagcaacctcaaggacccaccccttctctcccagttctcggggggacaatacccactcaacggcatccttgggggcagccggcaaccttcatccccaagtcataacactaaccttcgggctgggagccaagagttctgggccaacggtacccagagtcccatggggcttaactttgattcacaagaactgtaagattcctttcctgaccataattttgaggtgatgcccaatggaccccctagttttttcacctccccacagacttctcctatgttgggatctagcattcaaacctttgcaccctcccaggaggtaggcagtggtatccatcctgatgaggcagcagaaaaggagatgacttcagttgtggcagagaatggcactggcttggtaggcagcttggagctggaagaagagcagccagaactgaagatgtgtggctacaatggctctgtcccttctgtggaatcgttacaccaagaggtctcagtcctggtccctgaccccacagtgagctgtttagatgatccttcacatcttcctgatcaactggaagacactccaatcctcagtgaagactctctggagcccttcaactctctggcaccagagccagtgagtggaggactatatggtattgatgacacggagctgatgggtgcagaggacaagctgcctcttgaggacagccctgtgatttctgcccttgattgcccttccctcaataatgctactgccttcagtctcctggcagatgatagtcaaacatcaacctctatctttgccagtcccacctctccacctgtcctaggggagtctgtcctgcaagataacagctttgacctgaataatggtagtgacgctgaacaggaagaaatggaaactcaatcttcagacttcccaccatccctgacccagccagctcctgatcagtcatccactattcagctacatccagcaacctcaccagcagtctcgccaacaacctccccagcagtctccctagtggtttctccagcagcctccccagaaatctctccagaagtttgtcccgcagcttctacagttgtctctccagcagtcttctcagtggtctctccagcttcctcagcagtcctcccagcagtctccttagaagtcccgttgacggcttcagtgacatccccaaaagcctctcccgtaacttccccagcagctgcctttccaacagcctccccagcaaataaggatgtcagcagctttctagaaaccactgctgacgtggaagagatcactggagaaggactcactgcttctggtagtggtgatgtcatgaggagatgtattgctaccccagaagaagttcgtcttcccctccaacatgggtggcggagagaggtgcgcatcaagaagggcagccaccgatggcagggggagacctggtattatggcccctgtgggaagaggatgaagcaatttccagaagtgatcaagtacctgagccgcaacgtggtacacagtgtccgccgagagcacttcagcttcagtccccgtatgcctgttggagatttctttgaagaaagagacacgccagagggcttgcagtgggtgcagctctcagcagaggagatcccgtcgaggattcaggcaattactggcaaacggggtcgacctcgaaacactgagaaggctaagactaaggaagtccccaaggtgaaacggggtcgaggtcggccacctaaggtcaaaatcactgagctattgaacaagacagacaaccgccccctaaagaaactggaggcccaagaaacattgaatgaggaggataaagcaaagattgctaaaagcaagaagaagatgaggcagaaggttcaacggggagagtgtcagactactatccaagggcaggccagaaataagcggaaacaagagaccaagagcttaaagcagaaggaagctaagaagaaatccaaggctgagaaagaaaaaggaaagacaaagcaggaaaaactgaaggaaaaagtcaagagggaaaagaaggagaaggtaaaaatgaaggaaaaggaggaggtgaccaaagccaagccagcctgtaaagcagataagaccctggccacacagaggcgcttggaggaacggcagaggcagcagatgatcttggaggaaatgaagaagccgacagaggatatgtgtctgactgaccaccagcccctgcctgacttctcacgagtccctggtctgacattgcccagtggagccttctcagactgcttgaccattgtggagttcctgcatagctttggcaaggtgctgggctttgatcctgccaaagatgtgcctagcctgggggtcctgcaggagggactcctgtgtcaaggtgacagcttgggtgaggtgcaagacctgctggtcaggctgctgaaggctgcactccatgatcctggctttccctcctactgtcagtccctaaagatcttgggggagaaggtgtctgagatcccactgacaagagacaatgtgtcagagatcctgcgctgcttccttatggcatatggagtagagccagccctctgtgaccgcctgcgcacccagccttttcaggcccagccaccccagcagaaggctgctgtcctggccttccttgtgcatgagctcaatggctccaccctcatcatcaatgagattgacaagactctggagagtatgtccagctacaggaaaaacaagtggattgttgaaggccggctccggaggctgaaaactgttctggccaagcgaactgggcggtctgaagtagagatggaagggccagaggaatgcctgggacggaggcgcagttctcggatcatggaggagaccagtggcatggaagaagaggaagaagaggagtctatagcagctgtccctggccgcaggggtcgaagagatggagaggttgatgccacagcatctagcatcccagagctagagcgccagatagaaaaactcagcaagcgtcagcttttctttcgcaaaaagctgcttcactcatcccagatgcttcgggcggtctccctgggtcaggaccgctacagacgtcgctactgggtattgccgtatttggctggtatctttgtagaaggaacagaggggaacttagttcctgaggaggtgataaagaaggaaactgactccttaaaagtggcagcccatgcgtcactcaaccctgccctcttctctatgaagatggagttagctggctccaacaccactgccagttctcctgcccgggcccgaggccgacctcgaaaaactaagcccgggtctatgcaacctaggcatcttaagtcccctgtcaggggtcaggattcagaacagccccaggcccagcttcagcctgaggctcagcttcatgctcctgcccagccccagcctcagcttcagcttcagcttcagtcccataaggggttcctggagcaagaaggctcccctttgtcactgggtcagagccagcatgacctcagccagtcagccttcctgtcttggctgagccagactcagagccatagctccctgttgagcagctcagtcctcacacctgatagcagtccgggaaaactagacccagctccatcacaacccccggaggagccagagcctgatgaggcagaatccagccctgatcctcaagcactctggtttaacatctcagcccagatgccctgcaatgctgccccaacaccgccccctgcagtttctgaggaccaacccactccctcccctcagcagcttgcctcctccaagccaatgaatagacctagtgctgccaacccttgttctccagtgcagttctcttccacgcccttggctgggttggcccctaagaggcgagcaggagaccctggagaaatgccacagagtcccacagggctgggacagcccaaacggagagggagacctcccagtaagttcttcaaacagatggaacagcgttacctaacccagctgacagcccagcctgtcccacctgagatgtgctcaggctggtggtggatacgagatcctgagatgttggatgccatgctcaaggccctacacccccgaggtatccgggagaaggcacttcacaaacaccttaacaagcacagggacttcttgcaggaagtctgcctgcggccctcagctgaccccatctttgagcccaggcaactacctgcctttcaagaagggattatgagctggtcccccaaagagaagacatacgagacagacctagcagtgcttcaatgggtagaggagctggagcagcgggttatcatgtctgatctgcagattcggggctggacatgtcctagcccagactctacccgtgaagacttggcctactgtgagcacctctccgactcccaggaggatatcacctggcgaggtcggggcagggagggactggcacctcagcgtaaaactaccaaccctttggacctggctgtgatgcggctggctgccctggaacagaatgtagaacggcggtacctgcgggagcccctctggccaactcatgaggttgtgctggagaaggccctgcttagcacacctaatggtgcccctgagggcaccactacagagatatcatatgagatcacccctcgcattcgtgtctggcgccagaccctcgagcggtgccggagcgcagcccaggtgtgcttgtgcctgggccagctggagaggtccattgcctgggagaagtctgtcaacaaagtgacatgtctagtctgccggaagggtgacaatgatgagtttcttctgctttgtgatgggtgtgaccgtggctgccacatttactgccatcgtcccaagatggaggctgtcccagaaggagattggttctgtactgtctgtttggctcagcaggtggagggagaattcactcagaagcctggtttcccaaagcgtggccagaagcggaaaagtggttattcgctgaacttctcagagggtgatggccgccgacgccgggtactgttgaggggccgagaaagcccagcagcagggcctcggtactcggaagaagggctctccccctccaagcggcggcgactctctatgcggaaccaccacagtgatctcacattttgcgagattatcctgatggagatggagtcccatgatgcagcctggcctttcctagagcctgtgaacccacgtttggtgagtgggtaccggcgcatcatcaaaaatcctatggatttttccaccatgcgggagcggctgctcaggggagggtacaccagctcagaggagtttgcggctgatgccctcctggtatttgacaactgccagactttcaacgaggatgactctgaagtaggcaaggctgggcacatcatgcgccgcttcttcgagagccgctgggaggagttttatcagggaaaacaggccaatctgtgaggcaagggaggtggggagtcaccttgtggcatctccccccaccttccaaacaaaaacctgccattttcacctgctgatgctgccctgggtccagactcaagtcagatacaaccctgatttttgaccttgcccttggcagtgccccacatcctcttattcctacatccctttctcccttccctcctcttgctcctcaagtaagaggtgcagagatgaggtccttctggactaaaagccaaaaaaagaaag

SEQ ID NO: 18183 - protein, 1727 aa, Homo sapiens [sequence omitted]

SEQ ID NO: 18184 - DNA, 5243 bp, Homo sapiens
  CDS (227)..(655)
gcagttaagtatttgtttaatcttgctttgtcttttcaaacagcgatttagtaatcctgtttgaggctgcagtgtggcaatgctttccagaggatggagtcctttttgtttgttttgaaaaaatagagatggggtttcactatgttgcctaggctggtctcatactcggcctcgagccatcctcctgcctgggcctcccaaagtgttgggattacaggcgtgagccatggtgccagactggagtccttttattaaaattaactgccctgctcagctttctgctgggccaccccagagccaatccttggttcttgggcccaaggctggacccaggggttgcaggaaacagtctgtagcatccaagtggggcctgtcgtacccactccagtgtgtaggtgcagaacgctctttgggggatttctctgctgggccaccttactccagggatccctcagttttcaaaacaaagcaagagggcaaggaagaatggagaaacagctcagtgttgactctcttccccctggtgagtgctgtgctggggcctctgtgcacatcataccacttcccccttgaatcagccccacaaggcagggtgagagatgaggactcagggtgcaaggaggtctcacagcttggaaatggatcaggacagctctgattctccaaggccaaggtcttctctatatcatgaggcagcccaaaaatgtgtttctacacatattctgtgtagaaactcaggccaggctcctatatgctctgggtgacagcgggaaggtgctttccagtgtgtatcagtgtggcccatctgggagtcataatgtcattgcctcttccaaaatatcagcaaagctgaccctagtgcttgtagtgctcaaatgcacctctctgcctttgtgccatagggaaatggatttggtcctgggggtggtgataccaacttctgtctcaattccatgaccctcactcagcacccccaccccaggcctgtgcagaggaggaataaccgtccttgagaaccatccagccctaggtggagaaattagatttatggacttaatcagttcttcttccctgtcagtggtggtgagaatgacatgggggaaattgataagcctcagtcatgttttcctgcgagacaaggcagctttggtagctggtgggactgacgccttcttcacctgtgtcctctgcctctgagtgactataaattgcgaaccccatgaggtggcacctgcagccacagatcgcttaggcaccttgcacagggggccacctaatgaactggctgcaggacggcaatcctgccgtgaagccaggcacctcgggaggggcaaggtggcagaaccgagagagcagatgctccttgctgtttctgtaaggccaccagtggctgggtggcctggccctggtagcaaggtggtaaccgtgtgagtggctgaatcctgcaccacttttcctgagcctccttcctcctggattcctgcaactatattctcactacatggctcaccaccaattcgttctctctgccccaaggaggctggacaagaggctcaggtcagtgcgggtacgcaggaacctatgtctgtaaaatgaaaatgcctgccttcaagggctgtcttgaggttgaaaggagatggtctacatcaagggttaggaagaccacaatgtggctgtgccggccacctccaggctggcttcagtctcccatccccatagtcatacccctgtgaagtcccttcccatactgaatcgggctacctgtgtatcttatagggtgttggaaatgacagattgtgaattccaaggccccataaaagacagcgtgggctgggcgtggtggctcacgcctgtaatcccagcactttgggaggccgagccaagtggatcacttgaggtcaggagttctagaccagcctggccagcatggtgaaaacctatctctactaaaaatacaaaaaaaaaaatttagccaggtgtgttggcacctgtgcctgtagtcccagatacttgggaggctgagccaggagaatcacttgaacctgagaggtggaggtttcagtgagccgagattgtgccactgcactccagctgggtggcagagactctgtctctaaacaaagaaaatgtggtttctgctgtcctttctcttggatcactttctctgggaaaccagccaccatcttgtgaggacactcaagctctctggaaaggttcagaaatgtggtgaggaagtgagacagacctcttgccaaaaaccatgtactaacttatcagtcacgtacatgagttgacttagaaatgactctatcagcctcagccaaaccttcagatgactgcagccctggtcaacatcttgactgtgaccccatggaagaccctgaaacactcagccaagccactctcagcttcctgatccacagaagcagcatgaaataataaatttttcttgttttaaactaagttttgggttaatttgttatacagctgtagataactccaagaataatactccataaatgttgatttcctttctgcggctccactgagtcatctttgttcatgggcaaagctcactgtctctctactggctgcaaaagatgtccatttgttggctctgactcatgcttgtggtcttgttggctcacagcaaggccttttcacagaggatggtggtttgtcacactcagaatccaggtcttacctgctttcctgctccatggaattttgacctgagtttgaaggctgataggggattgatggatgagggagaaagacacagtcagttcttagagcagtagctaatccaggggtttctctggctttgtttgcatgagtagtgatagttggggatgaagcatgggtattcgagatcttttttgtgtgagtatgggaggaaaaattctgttctcttcctcctccatctttattcatctttgtcttccctcggatcagctttaaagacccctgagactctaggactcggtttgcttttttctcaccactgggatccatctcccactagtaggaagaaggatctaagtagttgagctgcataaaggggaagtaaacagccagacaaatgttacattttagagccttgagtgacccagagctttctatcagcttcattgggtgcagggagggtagcgatttctggctgctgtcacctccttgctcatatcaggaagcgctaattttgaggcaaagttcagtgccctctggctcacctagggcccctgttgcctaatttcacgaggccaagagtttgagggtgggttcggggctgcgcagcctggatgccttggtttgcatgcctacagcagctgtgcccgaaagctttttttagagtaaatatgtagcttttgctaggctttttgtgtgccttgttcattcctctatcattttttgtatacctgctatggtgtcaggcactggggatacaaattagccggggactcggacatgtaagcaagtaagcccaacagcagctaacatttatgcagtgctcactgtgtgcttggatgtccagagtgatagagcaggtttagtaagggggacagagggctgagaccagaggcaaggtggagaagggcatttctggaggcagcaatatgagtgcaaaggagacatacacaaggttccctgggggattccaagttgttgctgtcgtggcttcaaatcttactttagggcctactcagatggcatcttgttcatgaagatgtgcctgttttttgttttatttgtccctctccccccaacaaagagtaaactttttttctgaacttctcgaaagtttgctaacatcagctataaaactctctgggcctgggatattttgcggggagcagggaagatctttgattatcattttaacttatttctgttcatttattcaagctttttcttctttcaccaattctcaaaagccccacaccaccctcctgccaaccccacacccctccacttccagtcgctaccttccacccatcattctcacttctaaagccatcaacagaggttttgaacaccactcatgtgccaggtgttgttctaagcacagattcatcagtgagccaaatgaaattccttcctaaaatatgctctttggtggtgctaaatgccaggaagaaaagtaagcaaggggagggaagagagaggtgtggggtggcggggggcgggagcttggataggatggtcagaaaggacctctttgtagaaacttaaataaatttagaaagcaagtcatgtaatatctgggaaagaggaaatagcaggtgcaaagaccctgaggttgaagtgtcctggcaagtttgaggcaagcaaggaaggcagggtggttggaacagaacaagagaagaaacgtggtaggaaatgatggagagtcagggacacgaccttggaggacttgcaggtcatggtaaagacgctggactcgacacgaagtgtgaacagagttcttggaggattctgaggtagagagtagcataatctcatttgtgtttttattctaacatgctcacttgggccaccttgtagaggctagagtgaaaaggagggagactagttagaaattctgtattgctggctgggcgtggtagctcccggcactgtgggaggccaaggccagaggattgcttgagtctagcagtttgagcccagcctaggcaacatagcgagaccctgtctctacaaaaaattttaaaattgcccagggatggtggtgcacacttgtagtcccaactacttgggaggctgaggtgggaggattgcctgagcccaggagtttgaggctccagtgagctgtgattgtgccattgcactccagcctgggtgacagagcgagaccctgtctctaaaaaaaaaagaaaaaaaaagaaattctgtattgcagcagcctaagagagtcattagttaagagatttgtagtaggcattttttagaaagttgcattgagggctaggtacggtggctcatgcctataatcccagcactttgggaggccaaggtgggtagatcatttgaggtcaggagcctggccaacatagcgaaaccccgtctctactaaaaaaattagccgggcggtagtggcatgcgcctgtaatcccagctactcgggaggctgaggcaggagaattgcttgagcctgggaggtggaggttgccagtgagtcgagatcgcgccactgcactccagcagtctgggcgacagagtgagacgctgtttcaaaaaaaaaaaag

SEQ ID NO: 18185 - protein, 143 aa, Homo sapiens
MVPDWSPFIKINCPAQLSAGPPQSQSLVLGPKAGPRGCRKQSVASKWGLSYPLQCVGAERSLGDFSAGPPYSRDPSVFKTKQEGKEEWRNSSVLTLFPLVSAVLGPLCTSYHFPLESAPQGRVRDEDSGCKEVSQLGNGSGQL

SEQ ID NO: 18186 - DNA, 4596 bp, Homo sapiens
  CDS (4)..(1962)
gcgatgattcccccacaggaggcatccgctcgacggcgggagattgaggacaagctgaagcaggaggaggagactctgtccttcatccgagacagcctggagaagagcgaccagctcactaagaacatggtgtctatcttatcatcctttgagagccgccttatgaagctggagaactccatcatccctgtgcacaagcagacggagaatctgcagcggctgcaggagaatgttgagaagacgctgtcctgcctggaccatgtcatcagctactaccatgtggccagtgacactgagaagatcatcagagagggccccacaggtaggctggaagagtacctgggaagcatggccaagattcagaaggcagtggagtatttccaggacaacagcccagacagcccggaactcaacaaagtgaaactgctctttgagcgcgggaaggaggccctggagtccgaatttcgcagcctgatgacgcggcacagtaaggtcgtctcgcccgtgctcatcttggatctgatcagtggtgacgatgatctggaggcccaggaggacgtgaccctggagcacctgcccgagagcgtgctccaggatgtcattcgcatctcccgctggctggtggaatatggccgcaaccaagatttcatgaacgtctactaccagatacgctccagccagctggaccgctccatcaaaggacagaaggagcatttccataagagcagttcttcctctggggttccctactcccctgctatccccaacaagaggaaagacacacctaccaagaagccagtcaagcggccagggagagatgacatgctggacgtggagaccaatgcctacatccactgcgtcagtgccttcgtcaagctggcgcagagcgagtaccagctgctggccgacatcatccccgagcaccaccagaagaagaccttcgactccctgatacaggatgccctggatgggctgatgcttgaaggggagaacatcgtgtctgctgcccggaaggccattgtgcgacacgacttctccacggtgctcaccgtcttccccatcctgcgacacctcaagcagaccaagcctgagtttgaccaggtgctccagggcacggctgccagcacaaagaacaagctgcctggcctcatcacatccatggagaccatcggtgccaaagcgctggaggacttcgcagacaacatcaagaatgacccggacaaggagtacaacatgccgaaggacggcaccgtacacgagctcaccagcaatgccatcctcttcctgcagcagcttttggacttccaggagacggcaggcgccatgctggcctcccaagagaccagctcttcggccaccagctacagctctgagttcagcaagcggctgctaagcacctatatctgtaaagtgctgggcaacctgcagttgaacttgctgagcaagtccaaggtgtacgaggacccagctctgagcgccatcttcctgcacaacaactacaattacatcctcaagtccctggagaagtctgaactgatccagctggtggcagtgacacagaagactgctgagcgctcctaccgggagcacattgagcagcagatccagacctaccagcgcagctggttaaaggtgactgattacatcgcagagaagaatctacctgtgttccagccgggagtcaagctccggggcaaggagcggcagattatcaaggagcgttttaagggcttcaatgatggcctcgaagaactgtgcaaaatccagaaggcctgggctattccagacacagagcagagggacaggattcgccaggcccagaagaccattgtcaaggagacctacggggcctttctacagaagtttggcagcgtgcccttcaccaagaacccggagaagtacatcaagtacggggtggagcaggtgggcgacatgatcgatcgccttttcgacacctctgcctgagcctgctgctagccctgcctggttccaccagactggcgtgtcattggacagataaaccagtgttagcttgcctctgggctgggtgagcttgaagtcctctgggacagagacctgtctccacgcctccgggagctgtgtccctgagccccctagtcctggctcctgctttttccccacagcccgtgttcccagccgaaccagcactctcccggaagcctggggtccctccacaccttggcttttatgaccctgatggcttctgaaacaggaaaagagagaaggaagacagaggcctgtgcccactgctgctccatgtgtaccaagagcagcagggcagaagggccctccctccagcctaggtcagaggtggggacagagaactcccctacagcccagagatgtggcagggctcagagaagcagccagagctcctggaggaaaggcagtcgggactgaccccctctcttaaaacacattcccgcccgcccacaggcctgaggtctgggacctttccctcccaggagccccctaggtggctgggggaggcaggctcactggccattttccctagagtccagcacactgcaggaggcgttcggaggaggagttccgccccaccctctacagccttcctcaggcccctgtctctggtccccagcctcagtgcctcttggcccagggccaggcagtcgtggttgcagaaggagcaattaggctgcctgcctgtgggctgggagacagggacaatggggaaaagttaaggagcaaaatgggggttggaagcaaaaaatagggccccacctatttaggacgagattgaagactgacccttgaggcacacttgcactggagatgggtttatttcacgctctgtgcttgtgtgctagcggagggagagctcagggtggcttaattcagaggccctgtcatggcccgcccccagccatgggaaagcaaacttcatcctaaggtgtgcagcccaggccctgcccctttacagtctaggccgcctgccatggggtgcagcctctccaggggctgcgtcagacttgcacgctgcccacatccagattcctgcaaagacgaattgggtgcacagcaccccaaccacatacacgaggaagaagatgcggtcagcagtctcaggccagcttctctgtgacccctttactcctctggagggctctgtggggagaggtacagggaaaggagctgttcttcaaggtcccctcaacatgagcggaagagcgaaccccaggggtcatcagcctgtatcgcttcctttcttagattctcagctgatgaaaatttgggtctggcccatttcaggccatcttcagttgaagaaacaccctcttaggctgtgcaaggcatgggttatcaggggattgaggtcacctgggacttcagggaggctcagcttgctccctgccccagacctgtttcttctaagggaggaggacatggtggagaccagggacaggagagccagcagggtggatgcaaggggcctctacccacacctggacctccgtgccctcaccccagccctaggtgtgcacctaggcctcattccttaccccccagcccctgcccaccttcagcaggatgaggccctgggttgccgtgctctcgctgttcccctctcggggctgggctggggccgctcttggccccaaggttgccccgggccagcagcccagccagcagcacagtctctatggtgctgaggaagagcagcagcagcaggatggtgaagtagtaaactgggggaggcagggcacagggagatgctcaggggccagtccctgtgtctctggtgcccagcgagctgagcaccagtgggtgaccggggagaaacagggcagactgggtaagggagcagggcttactgagcagtgggttgcaggaggaggagctgggcagggcctgcaccagggaggagtggaggacgaggtatctcagcagcaatgtcaccttgtagcctatgcgctcaatggcccggaggggcagcaaccccccgcacacgtcagccaacagcagtgcctctgcaggcaccaagagagcgatgatggacttgagcgccgtgttcttcagcctcagctggaaggggaaaagtcagggccttcccggcgggggggaaggaggtgggcatcgggggcatggggcctggcctctggccgtgcatcctcactcccacccgcctccagcagccctctgtcggcctcctcgcgacttgactcaccgtcacctggaagcagggcaccggctgctggggtgggacttgggtcttcagatcataaactacgtattccctcttgacactcacaatctcgttcaccacgtgggcctggaactctaactccatcgctgaggggtggatatgagaactatgaaccaggaaggagagatcccagctgccaagtctgggggtagcagactggagcccaggggtgatggagacttttgatggcttttggcagggacagacttggacacaaaaccgatccatagaagggcttcccaaaccttgttttgcaacatcccaaattgtctccagttgaaggaaggcctttatcagattcatagatgagctttcattgtaaaaataaatgtactttgcaccacttc

SEQ ID NO: 18187 - protein, 653 aa, Homo sapiens
MIPPQEASARRREIEDKLKQEEETLSFIRDSLEKSDQLTKNMVSILSSFESRLMKLENSIIPVHKQTENLQRLQENVEKTLSCLDHVISYYHVASDTEKIIREGPTGRLEEYLGSMAKIQKAVEYFQDNSPDSPELNKVKLLFERGKEALESEFRSLMTRHSKVVSPVLILDLISGDDDLEAQEDVTLEHLPESVLQDVIRISRWLVEYGRNQDFMNVYYQIRSSQLDRSIKGQKEHFHKSSSSSGVPYSPAIPNKRKDTPTKKPVKRPGRDDMLDVETNAYIHCVSAFVKLAQSEYQLLADIIPEHHQKKTFDSLIQDALDGLMLEGENIVSAARKAIVRHDFSTVLTVFPILRHLKQTKPEFDQVLQGTAASTKNKLPGLITSMETIGAKALEDFADNIKNDPDKEYNMPKDGTVHELTSNAILFLQQLLDFQETAGAMLASQETSSSATSYSSEFSKRLLSTYICKVLGNLQLNLLSKSKVYEDPALSAIFLHNNYNYILKSLEKSELIQLVAVTQKTAERSYREHIEQQIQTYQRSWLKVTDYIAEKNLPVFQPGVKLRGKERQIIKERFKGFNDGLEELCKIQKAWAIPDTEQRDRIRQAQKTIVKETYGAFLQKFGSVPFTKNPEKYIKYGVEQVGDMIDRLFDTSA

SEQ ID NO: 18188 - DNA, 6133 bp, Homo sapiens
  CDS (442)..(756)
aaatgcttttgctttgtgttcagccaagatttgcagccttttttcagaggttttaaaattttcagaaaaaacatttctaatgtgtctaatgtgtcagtggtaacactgacttaatggtaaatggtaaatgatttaagtttccttgtcagagtcagtattatttgaaggagttaggaaggcagtctgaggctgtgatgagtctccttacctcccaaatgatcaagatggcaaccccagctcgcaagccattcaaggcgggcataacgtaccatgggttttctccctttgatccacatacccttctcccgggagctggaagaactgtgaggagaaagggagctcttgaagttgaagcatcagtgaggagaaaaaccattcaccccttccccccactatggctgaggactggcttctgagacagtttaggaaactgacaaagccatgaaggaatggctcagctatcgaccatctggacatccagcagtatctatccatgtccttatctttgtggggctctttctagctggacacactagattctgcccggcccaaggcctctggagaaatccagcttgggcatgcatgcatgcagggagagccacacagcacagctgtgagggcaggagccagccctggagtgtgccccagggaagacacagctctcaggaggagactggaaagggtcctatggaagacattgcccttcccattcccctcgttgaagtgaactttggggacaggaaaataactgcattttaggtggtcagccaggcttccttccttatctgttatgagaaaatgagagacaccaaaatctgacagttacaggctagatttaacatactactcaggcactatctttaacagccactttcattaactaaaattgggtttctaatcatatttttttaaaagaaccaagaaggaatgtactatttcctgtagccaagtaggtcaggtcaggcagtctgcatgtccatccagacactccttccctgtcatcatcgacagaccgcctcctgccctgccctaaatggtgggggccagcctcccatccaggcgaggacagcttggctctgagccacctcagatacaagccaggcccagggctcaatttctgagctctggcatttccattaacaatgccttaaaggaaagcaagcaggggcagtcattttatgagttatatctaaggatgtttgatgttcagttctaactctacatgcccaggggaaccccagcactggcttaggcactgtgcagcactcagggttagggggccacacccactcctgccttcaaagagattatactctgatgagcatataccatgagtaaagaacaagggtttccacggacatcctcaccacagggaagactcgggtactgcttgtatcagaagctggcccagcagagccagtgaggttaggattatcggatcccagtgctggaagggatcttgaaggtcccttggctacgaccctttctgccaactgtgcagccacgcggggacccccttctgctctataactggcagtgccctatgattactttcctcagtggctaacagtcttcatagctgctttaaattcctcatgctgtggtttaaaacttagttttccatctttcctaacgacggtacaaagaagcagtcaccttattcaaattctgaaaccattaatgatccttattcctcccagaaaatcagactaattttgggaatttttacagtccccagaaatctgatttcctaacccacaaggaccacttctctgccatgtacttcagatggacacacacccctctggctgataaaccccactggatctgaccctggctggtgggaggggaccctggggcctcctaggactggacctctgtcttggctctatctcgcttattcatttgtgactggacagtgggagcctgtccagacacatgtgtacctggtccatttgcacgctatgctcatgggctttcttctgtatagtggagctactgtcttcgttcatgatcatctcactgtcagcttctgcccactggcccacctgccaagctgattacccatttgtccttccaaagtacttgaattaatttgtcttctccccttcccattctcttcccctgatgcacacatcccaagcacacactttctagtcaagattgtttaaaaatacatatttgtacacattttacagcaaaaaaacttttgtggctcagctgcataccctgaggacttctgctgagccccagtgcatagcagagcatagttggaaaatcacagctctagcctcatccacagatgtgaagagtgaaacagcacttggttggcaggaaatcctcaatgctgagtagtagtggctccctgaggtactgtagtctgcacttccaagagtggggatgcctctggtcagaagggaaggtagtgagtccaaaggaagctgagaattctccatgagcttgagttctgttcgcaactgctcccttccttcagcaaatccaagtttcccccagagaatcccattcccctagacagagcaggtggttctcccgcgaagagagtcagatacaggccactgagggggtcttcctggctagctgaagcagagcccgccaaaatagcttcttttccaatgaaacatttctgaatataacaccagaagcatctatacaattggaaaaaattgcgtgaattttaaggattgaacatgtattgttttaaacataggaatttataggtgccttaaaagcatacacatccacattacactgagtagatcgagtctttttctcctttgcctgccttcctcaccaacctcctgcctcttcacactgtgtggggtgtgttttggtggtgtgtggtggggagtattggcttaatttgagtttttgtaaatagcatttgcttggagccaaatgcagaactaaataatagagtaaaatcctttgccttgttctaaatcctgagagttcacttgccttaccctaaggcccccgactctgtgcccacccacacccctactccccagtggcagcagtcaggccccagcccccatgccgtctcttttctgtgcctctgtcctggtgccagggctctgagctgctgagagcttcgctttgtgagatcacccccatggcttccttcagcttcaagggtgtgggtggcctctaaatcactctatagtgcgaggagcaataacccagaaagtccatatgaataatacttggtcctcttctctgagtctttaaccaaaaatgaagtccactgccctggccagaattcttccttggctgtttgacaaaacttaattccacaactgtttcctcccagaggatgactcttagtgtaagcacatccctctttgagaatctgactgtttctgggaatcaaaaatgtgggtttatatttccgatacttctggagtgccaggttgtttggttttgttttcaacaaaatgtttggccctagaaatgcagcaacttgctctgttgccaggagcttccctgccaagtgtcttgtgcacagccctctcctgggtgagctcctggacaaagcctcatgccctggtaaaccctgcagactgcagccactattctggcctaggtcatagtcttgagcaccagctctgctagggctactcaggcattgcacttgtctgcaggtgctaggaatttatgttactgaagagtgagcaatgtcattgtgagagcatgtgcaagagcaagctttcctgcaatacctaaagaaaagcaaggggaatagtaggacctgggacagcagtcctaggcccattaattccccttgcccctctgacagaatttcgaactcagtattcttcgaatactcagatgccagggttgccattgtaacagaataacagtggctgggggacacccattcagtggctcttcagaaagaacaaattcactgggtggatataacacttaaggaaaatgctcaataagccacccattgagtctcagagcaacctgaccaacaaggtgaaaaccatttaaaagacacattgtcttgctggagaaccttcctcccctgggtttcaccatggaacttcagcattacatgactaatgggcacgtaaattaaatgttactaagcaagagactattctcacttcttgccaccctgagcagggcagggaagccagccagcagtcacagtgatggggacagccttaaaggcccatagtcacttggaagacaatggcagtgcccttaggggtttgcccaagccaggtaggatgttagcaccagcctagtgctcaaggatgaggacagtcacatccaccagcccccaaccctcagcaatgagtactcattctaggtcctgatagctgccttactttggcccccagatcacaagtccctttaaaggaaagctgatctcctcgtccactgtggcttgtgcttccttttgtcccaggtgccacccacgggctctgaacattcatcctagtttgcttgctcccgcatcccgagcagcatttgagtcttatgtttgaaatgggttcatttgagccagcaactccctgcttcccttttgtgcctcgtgcacttggagtgtccactgtcctttacctgtatcccaaggctccttctctgagacttcccagctctcctgttatttcccacctcatgcttttctttgcagctgaaccttattcacagtgaaatcagtaatttagccggctttgaggtggaggccataatcaatcctaccaatgctgacattgaccttaaagatgacctaggtaattggggacggggttcggcaccaccagctgtcagatgaaaagttatggaacccagaatttaggcatttcatcttcccagactttacagtggtcaagccaaatttccaaatccaagattgatatttgagtgtagacgctgaatatcaacttactccaggccattccaagtgtaaacggtctgtttcattaagtgtgattggctactctctcctcaattgcaaatacattgccatctgaattctcttccataatgatcaaactgactgctggttacttggggagggatttttaaacgtgttggtttttgtttgtttttttgtttttactttagaactgaaaaatctcaggtaactacaaaatgatagtttctccatttaaaccttaattagaaatgacaaagcttgaaagagaagacaggccacatcagtatgctattaagctgtctttagtccacaatttactaccatcacttcaacttttctttagaactgaaaacagtatatgactgaatgccaccttcttgaattatttggctagaggatggtattaaacagaagggcaatatctccaagtgagttcttatggaggaaaactgccccagagccatggtgtctccctgttcaagatggcagatggttcagggcagactgagaggtgcccctcaagtgtcctgcctctatggctttatctttgcatatgtggcactgtcagctcaatggcacgacagggctgctctgctgctcttcgatgtagaggcttgccaggggaaataggcacacagatgcagcctccttcctaaccctcaactgcaatctattttgtatcccttgagctctcagcttctgctgtttttgtcagatagcagacttccttactgggagatacactcattccatgggcccaggcctgacccacacgaactgggtgcaacagtgggctgaaaacatgaggactggactcaagagtgtccagcttgaacttgttttccaactgccttatacagatacttaaaaaaaaaaaggccacaagctagaaaaagcaatgattctatccaaagcacattttatactaaaatacaaaggccaggtgcagtggctcacacctgtaactccagcgttttgggaggctgaggcaggaggattgagtgaggccaggagttggagaccaacctgggcaagatagtgagacctcatctctacaaaaaataaaaaacttagctgggcttggtgacacgtgcctgtagtctcagctactcaggaggctgaggcaggaggattgcttgagcccaggagttcgaagctgcagtgagctatgattgtgccactgcactccagcctaggcaacagcaagatcctatctgt

SEQ ID NO: 18189 - protein, 105 aa, Homo sapiens [sequence omitted]

SEQ ID NO: 18190 - DNA, 5573 bp, Homo sapiens
  CDS (275)..(2221)
atattgactgtatgtcaggcccatgtccttttggggaggttcagcttcagccctcgacatcgttgttgcctaccctcaacagaactttcatctgggatgtcaaagctcataagagcatcggttagagctgcagttttccatccctcgcctgaggcagatcggtccgggtgagagctgcccagacggagtcactcactccatcagcggccgaatcgatgccaccgtggtcaggatcggaaccttctgcagcaatggcactgtgtcccggatcaagatgcaagaaggagtgaaaatggccttacacctcccatggttccaccccagaaatgtctccggcttcagcattgcaaaccgctcatctataaaacgtctgtgcatcatcgagtctgtgtttgagggtgaaggctcagcaaccctgatgtctgccaactacccagaaggcttccctgaggatgagctcatgacgtgtcagtttgtcgttcctgcacacctgcgggccagcgtctccttcctcaacttcaacctctccaactgtgagaggaaggaggagcgggttgaatactacatcccgggctccaccaccaaccccgaggtgttcaagctggaggacaagcagcctgggaacatggcggggaacttcaacctctctctgcaaggctgtgaccaagatgcccaaagtccagggatcctccggctgcagttccaagttttggtccaacatccacaaaatgaaagcaataaaatctacgtggttgacttgagtaatgagcgagccatgtcactcaccatcgagccacggcccgtcaaacagagccgcaagtttgtccctggctgtttcgtgtgtctagaatctcggacctgcagtagcaacctcaccctgacatctggctccaaacacaaaatctccttcctttgtgatgatctgacacgtctgtggatgaatgtggaaaaaaccataagctgcacagaccaccggtactgccaaaggaaatcctactcactccaggtgcccggtgacatcctccacctgcctgtggagctgcatgacttctcctggaagctgctggtgcccaaggacaggctcagcctggtgctggtgccagcccagaagctgcagcagcatacacacgagaagccctgcaacaccagcttcagctacctcgtggccagtgccatacccagccaggacctgtacttcggctccttctgcccgggaggctctatcaagcagatccaggtgaagcagaacatctcggtgacccttcgcacctttgcccccagcttccgacaagaggcctccaggcagggtctgacggtgtcctttataccttatttcaaagaggaaggcgttttcacggtgacccctgacacaaaaagcaaggtctacctgaggacccccaactgggaccggggcctgccatccctcacctctgtgtcctggaacatcagcgtgcccagagaccaggtggcctgcctgactttctttaaggagcggagcggcgtggtctgccagacagggcgcgcattcatgatcatccaggagcagcggacccgggctgaggagatcttcagcctggacgaggatgtgctccccaagccaagcttccaccatcacagcttctgggtcaacatctctaactgcagccccacgagcggcaagcagctagacctgctcttctcggtgacacttaccccaaggactgtggacttgactgtcatcctcatcgcagcggtgggaggtggagtcttactgctgtctgccctcgggctcatcatttgctgtgtgaaaaagaagaaaaagaagacaaacaagggccccgctgtgggtatctacaatggcaacatcaatactgagatgccgaggcagccaaaaaagtttcagaaagggcgaaaggacaatgactcccatgtgtatgcagtcatcgaggacaccatggtatatgggcatctgctacaggattccagcggctccttcctgcagccagaggtggacacctaccggccgttccagggcaccatgggggtctgtcctccctccccacccaccatatgctccagggccccaactgcaaagttggccactgaggagccacctcctcgctcccctcctgagtctgagagtgaaccgtacaccttctcccatcccaacaatggggatgtaagcagcaaggacacagacattcccttactgaacactcaggagcccatggagccagcagaataacttgatccattccagacgctttgctgagtttcataaagcagggcactgagacacccgtccgtgttcctaaccagaaatcctaaagaagaggaattatacagaaggaacagcaggaggttttcctggacaccgccaacttcacattgctcagtggactcattctaagggcaagacattgaaaatgatgaattccaatcgggatacagtcatgacagctcatgtgctcctcaacttaggctgtgcggttagccagcctgtaatgagaggagagaggcccgagtcacctagcatagggttgcagcaagccctggattcagagtgttaaacagaggcttgccctcttcaggacaacagttccaattccaaggagcctacctgaggtccctactctcactggggtccccaggatgaaaacgacaatgtgcctttttattattatttatttggtggtcctgtgttatttaagagatcaaatgtataaccacctagctcttttcacctgacttagtaataactcatactaactggtttggatgcctgggttgtgacttctactgaccgctagataaacgcgtgcctgtcccccaggtggtgggaataatttacaatctgtccaaccagaaaagaatgtgtgtgtttgagcagcattgacacatatctgctttgataagagacttcctgattctctaggtcggttcgtggttatcccattgtggaaattcatcttgaatcccattgtcctatagtcctagcaataagagaaatttcctcaagtttccatgtgcggttctcctagctgcagcaatactttgacatttaaagagaaatttagagaatattctcatcctctaaaaatgtttaaatatataccaaacagtggccccctgcattagttttctgttgccactgcaacccattacttggtagcttaaaaacaacacattagcttatagtcctggggatcagaattccaaaatggatgtccctgaatgaaaatcaaggtgtcagcagagctgtgctccttctgaaggctctagggagaagccggttccttgccatttcaagcttctagaggctggctgcattcccaggctccagtggctggtcaagcttttctcacatggcatcactgtgacactggccctcccacttccctctttgacttacaaagcccaccaggaagatccaggataatctctccatctaaagatccttcatcatcctggaagagccttttgccatgcaagacaacatagccacaggtggggattaggaccaggacatctttggggtgctgttattctgcctaccacaccttcctgccactgactcccacaggagaggctacaaaatgatctggcgcacagggatgttttgtttagcttgcggactctaacacttaaaaaaaaccccagatcagaagatctggccatgctggggctcacattctcacctagcaacaactggctggagctgggcaccagctctgcctttagaaggggtgtccacttcaccaggtcaccacagcccacactacgccctatcacttcccacaatgaggctaagtgtttgtttctactgatcaatgcccctgcaggttgcatttattgtaatgaaaaagaaagactgggattaatctctaatcaggtgagtagaccatgagaccaatgtgtgctcacattaccctttttcttttttttctttttctttttctttttttttttaatgtgagacaggatctcattctgttgcctaggctggagtgcagtggcgcaatctcggctcactgcaacctctgcctcctgggctcaagcaattctcccacctcagcctcccaaatagctgggatcactggcacaaaccaccatgcccagctaattttgtatttttgtagagacagggtttcaccatgttgcccaggctggtctcaacctcctgggctcaagcaatcctcctgcctcggcctcccaaagtgctgggattacagatgtgagccaccgcatccagccccacaccctcatttataccaattacctgcccagtaactgtggacttttgcttcctcacccctgctctgatctggaaggagagggattatgttatagcttgtcagcacagtcccaagttcaatatttctgcggcaaaaacttccttcaaaaaataaatgtacttcattgtattcaatgaattcaccttggaaatgcaccgcctcaacttgttcacatggcataaatgaaaggaattttatagtctcctaaatggcgtgtactgcaagacctcttgaacactttccagaggataggatatttaagtcatgcccttggcgttgcctatggcacctttcccttctgaaagtctggttcctgcccagtgacccttggccttgtgagccgagatgctgaccctgcataaagggccaaaggagggctgcggcttccttccctcactgaagagcccttatttgaattcactgtgtggagccctagccctccattctcgacattccccaacctcccagccccttccaagcaggactaggtgccctgcattccacccaaggtgggattggccttcttaggctggctacttgtcaccatcaccgacatcactgttgcctgcaaggacaccacgtggccattttccttcaactgagggctcaaaactcctggacaagttgctggctcctgagaccagtatttcctggagctgtgcctcagtgaaggggcccagcctgaggaaccctggctcttttctttaaagcccaggccccacttacataaaacatttcagggtcactggaaacagtgaagtgccatttgttgaagcctactgcatgccagcccactgctcatccacgtggtctgccatgcctacgaggaaggccagcgcatgcaggactggtctctaatgctgtggtcattgcacagaagggaaaggtctcaaggaagagtcaactgggacaagcacaagcccaccggacatggccttggtaaaggttagcagactggtgtgtgtggatctgcagtgcttcactggaaataatttattcattgcagatactttttaggtggcattttattcatttcctgtgctttaaataaacaaatgtaccaaaaaacaagtatcaagctgtttaagtgcttcggctacttgtcccctggttcagtagaggccccggtttcccagttgttgactgtgacaggctcagcatgggctcagcagatgctgtcttaatttgtggatgatacagaaagccaggctttgggatacaagttctttcctcttcatttgatgccgtgcactgtgtgaagcagatgtttttgtccggaaataaaaataatagtcttgg

SEQ ID NO: 18191 - protein, 649 aa, Homo sapiens
MQEGVKMALHLPWFHPRNVSGFSIANRSSIKRLCIIESVFEGEGSATLMSANYPEGFPEDELMTCQFVVPAHLRASVSFLNFNLSNCERKEERVEYYIPGSTTNPEVFKLEDKQPGNMAGNFNLSLQGCDQDAQSPGILRLQFQVLVQHPQNESNKIYVVDLSNERAMSLTIEPRPVKQSRKFVPGCFVCLESRTCSSNLTLTSGSKHKISFLCDDLTRLWMNVEKTISCTDHRYCQRKSYSLQVPGDILHLPVELHDFSWKLLVPKDRLSLVLVPAQKLQQHTHEKPCNTSFSYLVASAIPSQDLYFGSFCPGGSIKQIQVKQNISVTLRTFAPSFRQEASRQGLTVSFIPYFKEEGVFTVTPDTKSKVYLRTPNWDRGLPSLTSVSWNISVPRDQVACLTFFKERSGVVCQTGRAFMIIQEQRTRAEEIFSLDEDVLPKPSFHHHSFWVNISNCSPTSGKQLDLLFSVTLTPRTVDLTVILIAAVGGGVLLLSALGLIICCVKKKKKKTNKGPAVGIYNGNINTEMPRQPKKFQKGRKDNDSHVYAVIEDTMVYGHLLQDSSGSFLQPEVDTYRPFQGTMGVCPPSPPTICSRAPTAKLATEEPPPRSPPESESEPYTFSHPNNGDVSSKDTDIPLLNTQEPMEPAE

SEQ ID NO: 18192 - DNA, 6045 bp, Homo sapiens
  CDS (4833)..(5153)
cagtcagttactcaatatttatggaacacttcctgtgccaggccctggatttctcagctgtaacacagataaccaatatgtgccttatccctcaaatagctgacccaacggggcccaaaccccattttcatggtcctacctgtcctaccaacttttttttttttttttgccaatttctggtttttcttcctctagatcctgcctgcagacatttatatttgaacctgtgttcttggttccagacaatgtgggttcccaccaaaacccacttgcaccgaactctcatgggcttattagtaactctgtgaaagagttggctgcagtgggtggggtgaggggtttctggacccccttcacacaccacttagccctctctgactggcccttctgttaccactcctccgctttgctctgaacaagtgaccctttccctggcccagcaaaccaagagggcgtgaacaagccagtcccgctacctggcgcttctcccagggagcattctcctccccttctctggccccttctgtatttttatggtgttttccccaggctgctaattaattagccttctttacaaaggcggtgctctcacctcttcttcagggttggctgtgttcatttgtttagaacattgttccgtctcataaattggttggttattagactttttgttggtttatgactactgcatggaaatttcaggatagtcaagcacatttagagaaatttggtgactggttgaaataattgttagggaaggatgcagatgttctgtgttctaagcaggcttgttaaccagattggaaattactgtttatatctcatttttgctgcataggagctcattgagttagaatagtttccttttctacttctgctactgtcaaagcctcaagatgcaaaacacattcagtttagttgagcagctcctgcagtctgttcccagcaccagctatctgcaaagcgccatgttagaggtaagctgctaacttccatacagcctacaaaacccagatggccttccctatctcctggaagccttctctgactgctaccaccactttccccttccctagagttaatcttttcctttctgcaagtggcctgcgcatcctatttgggcatttgtttcatactgttcggtaattttttagcatcggcctctcttactagactgcgcactgaacctctgagtccagggactgtgtctccttcatgtttatatttccagcacccagtgggagactttaatagtcattagtaaagtactgaatgaatgaggaaaccttcaaagccagcttacatgagtgtttcatggggatttgttgaacagagatgccctgtctcagggtctcagtcccgtatctctctcctgtgctgttgcggcagcttcctgtctctctgctgctgctttgctcctgcagtctgttcccagcatgcagatcccgtcacccctcttcccggaaatctccagtgtcttccatcttacttcatggaaaagctagagcattcaattagaccccaaagatctgactcccagggccctcctgaaccccatcacttctgacccataatatacacactctaccaagctacccagaagcgcctgctccccctggaatgtactcccttgtcaaatcttctgatctagatgttcctctgcctagaatgttcttcccagatgcttgcatggctcacttctttacttcctcgtgtcttttcccagctgccaccatttcagtgatgccttatcaggacatcatctctgccaacagtctcacttcattcttttctagaatacttaccaccttttaatgtactatatatattgacttatccattgtttttttgtctccctcgctgaatgcaagccctatgaaggcagggatttgtggttcctctggttcatcatcctttccctcacactccagggactagattgcatgtcgtcatggtgacagccaacatgcagatggtgtttttgtgtcaggcgcttttctgagcatgttatacattatgattaataaacggaggaggtaagagtccaccaggcagtctgagctctgagcccttatgcttttctgcctagtagcaagtatttgttcaaagaatgaaggaatgagtacttatgataaggagataaagcaagttggcactgccttattagcctgtgttgcagttgaatgaaacagaggattcccagccttctccgagcacccaatgggactggcacttatgggagagaagaagctatgacaggggcttccatttcagttgtgccctaaaagcagctgggccaaaaggtggatcttgtggatgtaggtgaattatcatatgtaatcagccaactcaacttttacctccagactcttgcagcaaagaatggtcaaccttggaacattatctttaacatctcaaagttctttcttatcagtcacctcattttcttctcacaggaattagataaggagggaaggacagatggcatcatcctcattttatgtgtgagagcaggcagagctgaagagacatctatgaagtcccacagctgggagccagaatcctaacccagatccccagctttctcctgtcaccttcaggcctccctctggtcagtgtgatcatctttagactctccaggtggcagcaagctttgagaagttcctgctgctatttttactattcctgattctgttgacccccaaaacagactgctgagaggatgctagaccatgctcctggggagcaccagaaagggttcctggagctccagtgttcagctgcaggattgaactaagcacacctgttgagggggaccttgagaggggaggctgctgtagtttacaaagaaatgaacaaatagggcatatcagccctgcagtgcagctttaaggacatctcccatggtttgagccttgcggtgccatcctgccctgctggacttgaggtgcaaggtgtccattcatctagggctgccccagattctgcagatgtctccaatgcagtaccttggaagctctacggggcacaggcagctcttccaagaagggctaacaggtggaaaaggagcatttatggagcacctgccatttgccagcattctgctcagctccatgtcttactatctgttagcctcactctttgcagacaagcaggagatgagaccagactgggtaacacacccaaagcaccacagtggtggggcaaggctcccagtctgctccttctgacttgaagcacattccatcgccatatcactcatcacttcctccttgtcaaacaaagcaagactctgcactagcttcaggcttttgttttgttttttgacacagagtctcgctctgtcgcccaggctggagagcagtggcgccatctcggctcacggcaacctctgcctcccgggttcaagcaattctcctgtcttagcctcctgggtagctgggattacaggcgcgcgccactatgcctagcaatttttttgtatttttagtagagatgggattttaccacattggtcaggctggtctcaaactcctccactcaggtgatccaaccaccttggcctcccaaagtgctgggattacaggcatgagccaccctgcccggcctctagcttcagtgttaacctttgtgctgcttcctgtaccccatgaggctgaacatgaataagaagtcaagtttctaaagagtcttcaaactcagtaggtacagagatactgccctcagctgtttgtagatgtcatgtaagtagagatgttccacagttttcttgccagccatgaaagcctaaacaggagctttcagccttcgtgggtcttcattttcccagcctaatccaggactgggtcaagccaaatccaaggtgcagagagaaacattcccacttggcttcttctgatgtaaatgatgtgatctggtctagatttcccggttgacttatcttttctgttcagtcacatgatttggtgtatgtggatttttaaatctctttattataaaatttaaaggctgcagaagttatccagttgctcctaaagaattacaggttgagcgggctggcatggtggcttacgcctgtaatcccacactttgggaggctgaggcaagcgaatcccctgaggctaggagttcgaggtcagcctggcaaacatggcgaaaccccgtctttactaaaaatacaaaaattagctgcgtgtgatggcatgtacctgtaaccccaggtactcaggagactgaggcaggagaatcacatgaacctggcagagggaggttgcagtgaaccaagatcatgccactgcactcctgcctgggtgacacagcgagactccgtctcaaaaaaaaaaaaaaaaaaagatttacaggttgagtatccctaatctgaaaatccaaatgctccaaaatctgaaacttgctgagcaccaacatgacactaccatggaaaatttcacacataaaagtactttaactttgtgtaatgctcaaatgtatttaaaatatttttaaaaattacctttagcctccatgtttaagatatatatgaaacataaatgaattttatgttgagatttgggtctcatctcaaagatagcttattatatatgtaaatattccaaaatctgaaaaaatccaaacacttctcatcctaagcatttcagataggggatattcaacctatataaacaaagttgcttgcattagccaaccagaaaaacaaccaaaaaacactttaccttttccaatgcccatgcccccactcagctctgatcatcagtaactccattgatcactgtgtgctttcattcttcctgtctgatgacagctgtcccaatgggatgggcagagtgtcaaaggccagccagcaggtttcctgtcacctaagaaagcaacggccaccagtgatcactgtgcccccattcagggtctcacaggtctgtacagtcatgctgtctgccttagtagcagcattcagactcaagttacgttgcgacccatggcttaacaggtgcctggattgtgatgaaaatcaccatgaatataaggagtcatttgagggtcttctgtctagttgtctgtctctggtggtgcccagggctgtatgggtcctggggcactctgcttacccactcacccactgtgcatcattttcagaagagtaagctgcatcctaatatcccttaataatccaatatgtttcttttcatctctgaattattagacctccctggaattctatttgcagctgataggaatccaagttctaggtttcctgccaactcttcagtgaagcattttgctcattaaccaccaaaactcattcgggctggagtagtcaaatcccctcatcataggaacacatgagtggagggcaacagtgggtttgcctgccttgttggaatcaggatccttgatttaaggagactctaagagaagctagcaccaagtaacctagtagtaacctatagttgcctttctcagcaggcaatgcctttctcagcatttcctccttcaaggagatgggaagaagcaataaccctaagaaataatcagtatcatcatcttcctttttctgatgaggaaactaaggcttcagactgttaggtattttgcccaaaggctcacatagctggtaaaagcaagaggcaggatgtgctctcagggccagctgcccacagagccttcggtgggttttgctttgctccttcttactgtcttttggctcattaaaagtaacacaaggccgggcgcggtggctcacacctgtaatcccggcactttgggaggttgaggtgggcagatcacctgaggtcaggagttcaagaccagcctggccaacatggcaaaacctcgtctctactaaaaatacaaaaattagctgggtgtgggggtgcacacctgtagttccagctactgaggaagctgaggcaggagaattgcgtgaatccaggaggcggaggtatcagggaaccgagatcgcaccgctgtactccagcctgggcgacagaacaagacttcgtctcaaaaatatatctatacaagcacaaggtt

SEQ ID NO: 18193 - protein, 107 aa, Homo sapiens [sequence omitted]

SEQ ID NO: 18194 - DNA, 5041 bp, Homo sapiens
  CDS (3431)..(3757)
agataatatgcaacagcatctgtaatgactgcataaacaattcttgcattttcctgaagtgttcattttaaatgattgattcatggctcggttcaagtatacacacagattagcctttgcaaataattcacttaatactagctacaccctgtggcagttgttttaaggtttttgatctctagggggtgtacagaagtgttctacttgtgcaaattgttttcctttttatgtcatcaattctgaaaacgtaggcttattacaggaatttttccccccatatatttttgagcctcatgcaattttgtatagcagtagccagtgaagttatccatattgcttcctctgatatagtctctgagtcaatttgttttaatgtttaaaaacttattgcctacttttccttgacacttacatgttcggcgtttcagtggaagataaaatgaagaaacttgatttccactccactagaaacaggctattttccttctatttcatcaaatctcaaagcttatagagattataactgcatgttggttattttactgttcttgcctatctatctatctatctacaaatctatctttctatcttgttcattttagggataatgaagaagcatttagtgggaccccacaagcataataaaaagtgtcactgtaagatatatttacaagcataaatataaaaagcaatatagtacttagcaaaaaatataacacattctctcataaggcacattttttccacacttttattttgtttttacgatttaaagtagtcacttaaaaatcagaaagcaaaagttttttgacctagatttagttggtttataataagtcttgttggttatggtgagtaatcagttaatacctgttaagctaataatgaggtaagaaatatattgactttatttcttggtgtggaaatgacttatttattcaacagatacttattaagtgggccaggtactacttgttaatacaaatggtgaataaagtggcttacactcttatgagagagacagacagctccgagttaacaaatggataaaaatatacttacatatgtgatatgcgtagtgtaagataacgagggtggtcacggtggtggtaaactactccaaatactgtactcagagcatatgtgtgataaatgaagttgttgcagtatgtttaaaacactggagccaaaattttgagtgctcatttgaaaacactttatggtaaaacagtggtgcttagaatgatgcattaaaaaatatatatgactatcttgctgaaggtaaactttttttacaacttacctgacatgatctttcaaaattacaatagattgtatatgttggaaaacatttttgtaaaatgtacaataagtctgacatgtgagtgaaaaaaaccttttttcttaactttcaaaagtgctaaaatgccctgtgtagtatcatgtaaaatagtgacactaatgcctcactcagtggggaggtagatgtggctgaggagggacagatgaatggatctagtcagtagtaacacatttgaagttctggctgatccacagagtcttttacttctagggtcaaggtggtaacagccaattaataggagagcaggttggaagaagagtaaaagatctacatgctcatgttacttgtcgtgctcacagaaaacaaaccagttttgtgtgagaaaattgtttcccgtcaacttgaaaacattgaatttgctcaccctggagctttctttgatgctcctctcttcaagtcccatgtggctgtcttccttctaagaaagctatttataaactgcagtgctctacacaactgtaagcacagtggctgcagtctagtggaaatattttggggtcacaggtagttctgtattcaaatctcagctctggctctttctagctgggagacttgagcaaattatttaacttcctgatctatagcttcctcgactctaaaatgggggtaataaaactttgtttacaggattgtgtgaggattgagactgacacaggtaaggcgtcttctaccatggctggcacttagtctgttttgcttattacttagggctcaactttgaacgaacttgaggttacaaagctcagtatcaggttatcctcgggttgtttcctctgtaatcctcatttccctcagagcatggtgagagtcttgaagacatgaaacattttatgcttttctaccttccttgtgccttgcagagtcctcagtatccagtcagcacttaatgcttatactgccacttctggactgcctttcaacaaatttctcaaagttagagaccatgaagggcatggagactggtgcttttcatgccgtgcttctgcagattttggtggggaggcggtaataggggaatgaaggtggagccatatgaaataaactcttaaaggcatgatagtgaccaggaaaataatatgtaccatattgtgtgacaatccctatgcattgccaaaattgcccagtgtatttttattatgattaaaaccacaatgacacatatgatgcccatttaacatgctccaaaaacacaacaggaattcaccttcacaaagaacaatagacatggggccaagaccttggattctgaccagttttaaacacctacttcctcctacacagtcgagaattatcttacacgattcagccttagaactgggggcatggtttaaattgtaatgtctgaggagactcaggttggctgaataagaaggatgacagtgcctttgtccagttaaatctgcagaggttgtcttccatcctatgcagctgcctaccataaaagaggaatctaggaaagattttccatatagcaggcactcagtacttatgtaaagaatgaaaggacaaaaaaattgttctctttgtatgtcttaatgtaaccctaagagttccaagccaattgttgacattattctaacatagcataaagatttggacagacctgggtagcacattgtaatgatatttggcttgttgatttctcagctctaagagaatctctgcttttgccaataggcacacataagaatgttcttaatgctttagtaataacatagttatccaaaatgttaaactttattccgcaaaattttaactcaaaaaatatttttcagcaagtttacatgtattccctgggcaacactggtcaggcattcattcaacagtagacatttaagtatatattatatactgttcttgattgtgtgggaatttcaaagataaatgagattctatctttgccacttaagacttacaattattggctcccaggcaagatggctgaataggaacagctctggtctgcagctcccagtgagaccaacacagaaggcgggtgatttttgcatttccaactgaagcacccggttcatctcactgggattggttagacagtgggtgcagcccatggagggcgagcagaagcagggtggggcattgcctcacccgggaagtgcaaggggttggggaactcccttcctagccaagggaagccaagagggaccctgccatgagggacagtgctatcaggaccagatactacgcttttcccacagtcttcacaacctacagaccaggagattccctcaggtgcctacaccacaaaggccctgggtttcaagcacaaaactgggcggctgtttgggcagacatcgaactagctgcaggagttttatttcatacctcagtggcacctggaacaccagcgagacagaaccgttcactcccctggaataggggctgaagccagggagccaagtggtcttgctcaatggatcccaccccatggaacccatcaagctgagatccactggcttgaaattcttgctgccagcacagcagtctgaaattgaccagggacactctagcttggaagggggagggacgtctaccattactgaggcttgagtaggcagttttcccctcacagtgtaaacaaagccgcctggaagttcggactgtgtggagtccactgcagtgccacaaagccactgtagccagactgcctctctagattcctcctctctgggcagggcatctctgaaagaaaggcagcagccccagtcaggggattatggataaaactcccatctccctgggacagatcacctgcaggaaggggtggctgtaggcgcagcttcagcagactttaacgttcctgcctaacggctctaaagagagcaacggatctcccagcacagtgctcgagctctgctaagggacagacggcctcctcaaatgggtccctgacccttgtgccttctgacggggaaatatctcccagcaggggtcgagagacacctcatacaggggagttccggctggcatctggcaggtgcccctctgggacgaagcttccagtggaaggaatacacagcaatctttgctgttctgcagcctctgctggtgatacccaggcaaatagggtctggagtggacccccagcaaactccagcagacctgcagcaaaggggcctgactgttagaaggaaaactaataaacaaaaagcagtagcatcaacatcaacaaaaaggacgaccatgcaaaaacttcatcctaaggtcaccaacagcaaagaccaaaggtagataaatccatgaagatgaggaaaatccagcataaaaagggtgaaaattgcaaaaatcagaatacctcttatcttccaaaggattacaactccttgccaggaatgggaacaaaactggatggagaatgagtttgatgaattgacagaagtaggcttcagaaggtgggtaataacaaaatcctccaagctaaacaagcatgctctaacccaatgcaaggaagctaataaccttgataaaaggttagaggaattgctaactagaataactagtttagagaagaacataaacgacctgatgaagctgaaaacacagcccaagaatttcatgaagcatacacaagtatcaatagctgaattgatcaagtgaaagaaaggatatcagagattgaagatcaacttaatgaaataaagcatgaagacaagattagag

SEQ ID NO: 18195 - protein, 109 aa, Homo sapiens [sequence omitted]

SEQ ID NO: 18196 - DNA, 5834 bp, Homo sapiens
  CDS (120)..(2441)
cagatgaagtattggagattttgaagacggccagtgatgatcgggaatgtgaaaatcagctggttctgctgcttggtttcaacacctttgatttcattaaagtgttgcggcagcacaggatgatgattttatactgtaccttgctggccagtgcacaaagtgaagctgaaaaggaaaggattatgggaaagatggaagctgacccagagctatccaagttcctctaccagcttcatgaaaccgagaaggaggatctgatccgagaggaaaggtcccggagagagcgagtgcgtcagtctcgaatggacacagatctggaaaccatggatctcgaccagggtggagaggcactggctccacggcaggttctggacttggaggacctggtttttacccaagggagccactttatggccaataaacgctgtcagcttcctgatggatccttccgtcgccagcgtaagggctatgaagaggtgcatgtgcctgctctgaagcccaagccctttggctcagaagaacaactgcttccagtggaaaagctgccaaagtatgcccaggctgggtttgagggcttcaaaacactgaatcggatccagagtaagctctaccgtgctgcccttgagacggctgagaatctgctgctgtgtgctcctactggtgctgggaagaccaacgtggccctgatgtgcatgctccgagagattgggaaacacataaacatggacggcaccatcaatgtggatgacttcaagattatctacattgcccccatgcgctccttggtgcaggagatggtgggcagctttggaaagcgcctggccacttatggcatcactgttgctgaactgactggggaccaccagctgtccaaagaagagatcagtgccactcagatcatcgtctgcacccccgagaagtgggacatcatcacccgcaagggtggtgagcgcacctacacccagctggtgcggctcatcattctggatgagattcatcttctccacgatgacagaggtcctgtcttagaagctttagtggccagggccatccgaaacattgagatgacccaagaggatgtccgactcattggtctcagtgccaccctacccaactatgaagatgtagccacctttctacgtgttgaccctgccaagggtctcttttactttgacaacagcttccgtccagtgcctctggaacggacatatgtgggtatcacagagaaaaaagctatcaagcgtttccagatcatgaatgaaatcgtctatgaaaaaatcatggaacatgctggaaaaaatcaggtgctggtgtttgtccactcccggaaggagactggaaagacagccagggccatccgggacatgtgcctagaaaaggacactctgggtctgtttctgagggagggctcagcctccacagaagtcctgcgaacagaagctgagcagtgcaagaacctagagctgaaggatcttctgctttatggctttgctattcatcacgcaggcatgaccagggttgaccgaacactcgtggaggatctttttgctgataaacatattcaggttttagtttccacagcaactctagcttggggtgtgaatctccctgcacatacagtcatcatcaaaggcacccaggtgtacagtccagagaaggggcgttggacagaactgggagcactggacattctgcagatgctgggacgtgccggaagaccccagtatgacaccaagggtgaaggcatactcatcacatctcatggggagctacagtactacctgtccctcctcaatcaacaacttcctattgaaagccagatggtttcaaagcttcctgacatgctcaatgcagaaatcgtgctaggaaatgtccagaatgccaaggatgcggtgaactggctgggctatgcctacctctatatccgaatgctgcgatccccaaccctctatggcatctctcatgatgacctcaagggagatcccctgctggaccagcgccgactagatctggttcatacagctgccctgatgctggacaagaacaatctggtcaagtacgacaagaagacgggcaacttccaggtgacagaactgggccgtatagccagccactactacatcaccaatgatacagtgcagacttacaaccagctgctgaagccctccctgagtgagattgagcttttcagggtcttctcattgtcctctgagttcaagaacatcacagtgagagaggtggagaagctggagctgcagaagttgctggagagggtacctatccctgtaaaggagagcattgaggaacccagtgctaagatcaacgttcttctgcaagccttcatctcacagctgaaattggagggctttgcactgatggctgacatggtgtatgtcacacagtcggctggccggttgatgcgagcgatattgaaattgtcctgaaccgaggttgggcacagcttacagacaagaccctgaacctctgcaagatgatcgacaaacgcatgtggcagtccatgtgtcctctgcgcaagttccggaaactccctgaggaagtagtgaagaagattgagaagaagaatttcccctttgagcgtctgtacgacctgaatcataatgagattggggagcttatccgcatgccaaagatggggaagaccatccacaaatatgtccatctgtttcccaagctggagttgtcagtgcacctgcagcctatcacacgctccaccctgaaggtggagctgaccatcacgccagacttccagtgggatgaaaaggtgcatggttcatccgaggctttttggattctggtggaggatgtggacagcgaggtgattctgcaccatgagtattttctcctcaaggccaagtacgcccaggacgagcacctcattacattcttcgtgcctgtctttgaaccgctgccccctcagtacttcatccgagtggtgtctgaccgctggctctcttgtgagacccagctgcctgtctccttccggcacctgatcttgccggagaagtacccccctccaaccgaacttttggacctgcagcccttgcccgtgtctgctctgagaaacagtgcctttgagagtctttaccaagataaatttcctttcttcaatcccatccagacccaggtgtttaacactgtatacaacagtgacgacaacgtgtttgtgggggcccccacgggcagcgggaagactatttgtgcagactttgccatcctgcgaatgctgctgcagagctcggaggggcgctgtgtgtacatcacccccatggaggccctggcagagcaggtatacatggactggtacgagaagttccaggacaggctcaacaagaaggtggtactcctgataggcgagaccagcacagacctgaagctgctgggcaaagggaacattatcatcagcacccctgagaagtgggacatactttcccggcgatggaagcagcgcaagaacgtgcagaacatcaacctcttcgtggtggatgaggtccaccttatcgggggcgagaatgggcctgtcttagaagtgatctgctcccgaatgcgctacatctcctcccagattgagcggcccattcgcattgtggcactcagctcttcgctctccaatgccaaggatgtggcccactggctgggctgcagtgccacctccaccttcaacttccatcccaatgtgcgtcccgtccccttggagctgcacatccagggcttcaacatcagccatacacaaacccgcctgctctccatggccaagcctgtgtaccatgctatcaccaagcactcgcccaagaagcctgtcattgtctttgtgccgtctcgcaagcagagccgcctcactgccattgacatcctcaccacctgtgcagcagacatccaacggcagaggttcttgcactgcaccgagaaggatctgattccgtacctggagaagctaagtgacagcacgctcaaggaaacgctgctaaatggggtgggctacctgcatgaggggctcagccccatggagcgacgcctggtggagcagctcttcagctcaggggttatccaggtggtggtggcttctcggagtctctgctggggcatgaacgtggctgcccacctggtaatcatcatggatacccagtactacaatggcaagatccacgcctatgtggattaccccatctatgacgtgcttcagatggtgggccacgccaaccgccctttgcaggacgatgaggggcgctgtgtcatcatgtgtcagggctccaagaaggatttctttaagaagttcttatatgagccattgccagtagaatctcacctggaccactgtatgcatgaccacttcaatgctgagatcgtcaccaagaccattgagaacaagcaggatgctgtggactacctcacctggacctttctgtaccgccgcatgacacagaaccccaattactacaacctgcagggcatctcccatcgtcacttgtcggaccacttgtcagagctggtggagcagaccctgagtgacctggagcagtccaagtgcatcagcatcgaggacgagatggacgtggcgcctctgaacctaggcatgatcgccgcctactattacatcaactacaccaccattgagctcttcagcatgtccctcaatgccaagaccaaggtgcgagggcttatcgagatcatctccaatgcagcagagtatgagaacattcccatccggcaccatgaagacaatctcctgaggcagttggctcagaaggtcccccacaagctgaataaccctaagttcaatgatccgcacgtcaagaccaacctgctcctgcaggctcacttgtctcgcatgcagctgagtgctgagttgcagtcagatacggaggaaatccttagtaaggcaatccggctcatccaggcctgcgtggatgtcctttccagcaatgggtggctcagccctgctctggcagctatggaactgccccagatggtcacccaagccatgtggtccaaggactcatacctgaagcagctgccacacttcacctctgagcatatcaaacgttgcacagacaagggagtggagagtgttttcgacatcatggagatggaggatgaagaacggaacgcgttgcttcagctgactgacagccagattgcagatgtggctcgcttttgtaaccgctaccctaatatcgaactatcttatgaggtggtagataaggacagcatccgcagtggcgggccagttgtggtgctggtgcagctggagcgagaggaggaagtcacaggccctgtcattgcgcctctcttcccgcagaaacgtgaagagggctggtgggtggtgattggagatgccaagtccaatagcctcatctccatcaagaggctgaccttgcagcagaaggccaaggtgaagttggactttgtggccccagccactggtgcccacaactacactctgtacttcatgagtgacgcttacatgggatgtgaccaggagtacaaattcagcgtggatgttaaagaagctgagacagacagtgattcagattgagtcctgaggcatttacttttgggtaaaggagagttgagcctgaattaggaatgtgtacattgtaggaatcctggttgtggggaccaggtctgtgggcctcaggtctggccagccagggctggtgctgtccccgcctacctccacttcctttcccttgctcactctggatccagtgacagcaggtgtcatgggtcaagcataaatcatatatagcattttcaggcatgttcctggtagttcttttgagtctgacattctaataaaataatttgtagaaacc

SEQ ID NO: 18197 - protein, 774 aa, Homo sapiens [sequence omitted]

SEQ ID NO: 18198 - DNA, 6048 bp, Homo sapiens
  CDS (90)..(2426)
gttctggcgcccggagcgcggccatgtgaaccgcttgtaccccggggagagacgagccccgagcccggctggacgccgctgcctcagaaatggaggcaaacgaccattttaactttactggccttccccctgcacctgctgcctcaggactgaaaccctctccttcctcaggggagggcctctacactaacgggtctcccatgaacttcccccagcaagggaaaagtttgaatggggatgtgaatgttaatggcttatctactgtatctcacactactacttcagggattttgaactctgctccccactcctccagcacctcacacctccatcaccccagcgtggcctacgactgtctctggaactactcacagtacccatctgccaatcctggcagcaacctcaaggacccaccccttctctcccagttctcggggggacaatacccactcaacggcatccttgggggcagccggcaaccttcatccccaagtcataacactaaccttcgggctgggagccaagagttctgggccaacggtacccagagtcccatggggcttaactttgattcacaagaactgtatgattcctttcctgaccagaattttgaggtgatgcccaatggaccccctagttttttcacctccccacagacttctcctatgttgggatctagcattcaaacctttgcaccctcccaggaggtaggcagtggtatccatcctgatgaggcagcagaaaaggagatgacttcagttgtggcagagaatggcactggcttggtaggcagcttggagctggaagaagagcagccagaactgaagatgtgtggctacaatggctctgtcccttctgtggaatcgttacaccaagaggtctcagtcctggtccctgaccccacagtgagctgtttagatgatccttcacatcttcctgatcaactggaagacactccaatcctcagtgaagactctctggagcccttcaactctctggcaccagagccagtgagtggaggactatatggtattgatgacacggagctgatgggtgcagaggacaagctgcctcttgaggacagccctgtgatttctgcccttgattgcccttccctcaataatgctactgccttcagtctcctggcagatgatagtcaaacatcaacctctatctttgccagtcccacctctccacctgtcctaggggagtctgtcctgcaagataacagctttgacctgaataatggtagtgacgctgaacaggaagaaatggaaactcaatcttcagacttcccaccatccctgacccagccagctcctgatcagtcatccactattcagctacatccagcaacctcaccagcagtctcgccaacaacctccccagcagtctccctagtggtttctccagcagcctccccagaaatctctccagaagtttgtcccgcagcttctacagttgtctcttcagcagtcttctcagtggtctctccagcttcctcagcagtcctcccagcagtctccttagaagtcccgttgacggcttcagtgacatccccaaaagcctctcccgtaacttccccagcagctgcctttccaacagcctccccagcaaataaggatgtcagcagctttctagaaaccactgctgacgtggaagagatcactggagaaggactcactgcttctggtagtggtgatgtcatgaggagacgtattgctaccccagaagaagttcgtcttcccctccaacatgggtggcggagagaggtgcgcatcaagaagggcagccaccgatggcagggggagacttggtattatggcccctgtgggaagaggatgaagcaatttccagaagtgatcaagtacctgagccgcaacgtggtacacagtgtccgccgagagcacttcagcttcagtccccgtatgcctgttggagatttctttgaagaaagagacacgccagagggcttgcagtgggtgcagctctcagcagaggagatcccgtcgaggattcaggcaattactggcaaacggggtcgacctcgaaacactgagaaggctaagactaaggaagtccccaaggtgaaacggggtcgaggtcggccacctaaggtcaaaatcactgagctattgaacaagacagacaaccgccccctaaagaaactggaggcccaaaaaacattgaatgaggaggataaagcaaagattgctaaaagcaagaagaagatgaggcagaaggttcaacggggagagtgtcagactactatccaagggcaggccagaaataagaggaaacaagagaccaagagcttaaagcagaaggaagctaagaagaaatccaaggctgagaaagaaaaaggaaagacaaagcaggaaaaactgaaggaaaaagtcaagagggaaaagaaggagaaggtaaaatgaaggaaaaggaggaggtgaccaaagccaagccagcctgtaaagcagataagaccctggccacacagaggcgcttggaggaacggcagaggcagcagatgatcttggaggaaatgaagaagccgacagaggatatgtgtctgactgaccaccagcccctgcctgacttctcacgagtccctggtctgacattgcccagtggagccttctcagactgcttgaccattgtggagttcctgcatagctttggcaaggtgctgggctttgatcctgccaaagatgtgcctagcctgggggtcctgcaggagggactcccgtgtcaaggtgacagcttgggtgaggtgcaagacctgctggtcaggctgctgaaggctgcactccatgatcctggctttccctcctactgtcagtccctaaagatcttgggggagaaggtgtctgagatcccactgacaagagacaatgtgtcagagatcctgcgctgcttccttatggcatatggagtagagccagccctctgtgacagcctgcgcacccagccttttcaggcccagccaccccagcagaaggctgctgtcctggccttccttgtgcatgagctcaatggctccaccctcatcatcaatgagattgacaagactctggagagtatgtccagctacaggaaaaacaagtggattgttgaaggccggctccggaggctgaaaactgttctggccaagcgaactgggcggtctgaagtagagatggaagggccagaggaatgcctgggacggaggcgcagttctcggatcatggaggagaccagtggcatggaagaagaggaagaagaggagtctatagcagctgtccctggccgcaggggtcgaagagatggagaggttgatgccacagcatctagcatcccagagctagagcgccagatagaaaaactcagcaagcgtcagcttttctttcgcaaaaagctgcttcactcatcacagatgcttcgggcggtctccctgggtcaggaccgctacagacgtcgctactgggtattgccgtatttggctggtatctttgtagaaggaacagaggggaacttagttcctgaggaggtgataaagaaggaaactgactccttaaaagtggcagcccatgcgtcactcaaccctgcccttttctctatgaagatggagttagctggctccaacaccactgccagttctcctgcccgggcccgaggccgacctcgaaaaactaagcccgggtctatgcaacctaggcatcttaagtcccctgtcaggggtcaggattcagaacagccccgggcccagcttcagcctgaggctcagcttcatgctcctgcccagcccagcctcagcttcagcttcagcttcagtcccataaggggttcctggagcaagaaggctcccctttgtcactgggtcagagccagcatgacctcagccagtcagccttcctgtcttggctgagccagactcagagccatagctccctgttgagcagctcagtcctcacacctgatagcagtccgggaaaactagacccagctccatcacaacccccggaggagccagagcctgatgaggcagaatccagccctgatcctcaagcactctggtttaacatctcagcccagatgccctgcaatgctgcccccacaccgccccctgcagtttctgaggaccaacccactccctcccctcagcagcttgcctcctccaagccaatgaatagacctagtgctgccaacccttgttctccagtgcagttctcttccacgcccttggctgggttggcccctaagaggcgagcaggagaccctggagaaatgccacagagtcccacagggctgggacagcccaaacggagagggagacctcccagtaagttcttcaaacagatggaacagcgttacccaacccagctgacagcccagcctgtcccacctgagatgtgctcaggctggtggtggatacgagatcctgagatgttggatgccatgctcaaggccctacacccccgaggtatccgggagaaggcacttcacaaacaccttaacaagcacagggacttcttgcaggaagtctgcctgcggccctcagctgaccccatctttgagcccaggcaactacctgcctttcaagaagggattatgagctggtcccccaaagagaagacatacgagacagacctagcagtgcttcaatgggtagaggagctggagcagcgggatatcatgtctgatctgcagattcggggctggacatgtcctagcccagactctacccgtgaagacttggcctactgtgagcacctctccgactcccaggaggatatcacctggcgaggtcggggcagggagggactggcacctcagcgtaaaattaccgaccctttggacctggctgtgatgcggctggctgccctggaacagaatgtagaacggcggtacctgcgggagcccctctggccaactcacgaggttgtgctggagaaggccctgcttagcacacctaatggtgcccctgagggcaccactacagagatatcatatgagatcacccctcgcattcgtgtctggcgccagaccctcgagcggtgccggagcgcagcccaggtgtgcttgtgcctgggccagctggagaggtccattgcctgggagaagtctgtcaacaaagtgacatgtctagtctgccggaagggtgacaatgatgagtttcttctgctttgtgatgggtgtgaccgtggctgccacatttactgccatcgtcccaagatggaggctgtcccagaaggagattggttctgtactgtctgtttggctcagcaggtggagggagaattcactcagaagcctggtttcccaaagcgtggccagaagcggaaaagtggttattcgctgaacttctcagagggtgatggccgccgacgccgggtactgttgaggggccgagaaagcccagcagcagggcctcggtactcggaagaagggctctccccctccaagcggcggcgactctctatgcggaaccaccacagtgatctcacattttgcgagattatcctgatggagatggagtcccatgatgcagcctggcctttcctagagcctgagaacccacgtttggtgagtgggtaccggcgcatcatcaaaaatcctatggatttttccaccatgcgggagcggctgctcaggggagggtacaccagctcagaggagtttgcggctgatgccctcctggtatttgacaactgccagactttcaacgaggatgactctgaagtaggcaaggctgggcacatcatgcgccgcttcttcgagagccgctgggaggagttttatcagggaaaacaggccaatctgtgaggcaagggaggtggggagtcaccttgtggcatctccccccaccttccaaacaaaaacctgccattttcacctgctgatgctgccctgggtccagactcaagtcagatacaaccctgatttttgaccttgcccttggcagtgccccacatcctcttattcctacatccctttctcccttccctcctcttgctcctcaagtaagaggtgcagagatgaggtccttctggactaaaagccaaaaaaagaaag

SEQ ID NO: 18199 - protein, 779 aa, Homo sapiens
MEANDHFNFTGLPPAPAASGLKPSPSSGEGLYTNGSPMNFPQQGKSLNGDVNVNGLSTVSHTTTSGILNSAPHSSSTSHLHHPSVAYDCLWNYSQYPSANPGSNLKDPPLLSQFSGGQYPLNGILGGSRQPSSPSHNTNLRAGSQEFWANGTQSPMGLNFDSQELYDSFPDQNFEVMPNGPPSFFTSPQTSPMLGSSIQTFAPSQEVGSGIHPDEAAEKEMTSVVAENGTGLVGSLELEEEQPELKMCGYNGSVPSVESLHQEVSVLVPDPTVSCLDDPSHLPDQLEDTPILSEDSLEPFNSLAPEPVSGGLYGIDDTELMGAEDKLPLEDSPVISALDCPSLNNATAFSLLADDSQTSTSIFASPTSPPVLGESVLQDNSFDLNNGSDAEQEEMETQSSDFPPSLTQPAPDQSSTIQLHPATSPAVSPTTSPAVSLVVSPAASPEISPEVCPAASTVVSSAVFSVVSPASSAVLPAVSLEVPLTASVTSPKASPVTSPAAAFPTASPANKDVSSFLETTADVEEITGEGLTASGSGDVMRRRIATPEEVRLPLQHGWRREVRIKKGSHRWQGETWYYGPCGKRMKQFPEVIKYLSRNVVHSVRREHFSFSPRMPVGDFFEERDTPEGLQWVQLSAEEIPSRIQAITGKRGRPRNTEKAKTKEVPKVKRGRGRPPKVKITELLNKTDNRPLKKLEAQKTLNEEDKAKIAKSKKKMRQKVQRGECQTTIQGQARNKRKQETKSLKQKEAKKKSKAEKEKGKTKQEKLKEKVKREKKEKVK

SEQ ID NO: 18200 - DNA, 3543 bp, Homo sapiens
tgcgtgtcgttccccttctctgggatgggaggcagctgccacgggcctctgaaagaggtgcctggaggcaaagacattgcaagtccgaacttcgttctgggccaagctgtgtgcccacaggagcgggcaaacggggctgagaagcagcaagaaggacaagctcgggtaggagaaaaggggcagaagaagagtgacactgtggcttccttgatgttgcagcacccctctacggcccctcccaatccacagagcctctgaccagcaccagtcttgctgcctgtgctgggggcacttggaacattggttagcaggagcaacaggcctggcactgccagctaggttcagggaagagagaaatgggctgagctgctgctcctggtactactgggccatggatgaaggcaccagactagaagtccagagccctagccaggggcggcaggagggaagactaccacttattgtgtacctattctgtgcctagccccgcaggaggcacttgaatgtttctcatttagtcacatacatttattgagcacctaccacatgccaggcattgtcctgatgggatgcagtggtgagcaaggttcctgctctcataacaaccctgggaggtaggccctattgtcatccccattttacagatgagaaaatcaaggctcaatacagtttcatgatttatcacagctagtgagtgtggaggagggattctgggccctgacctaactcgtaagccttcgtttttcaggctacctttcatggccatgaccactcttctaatagcccccaggcttagccttgcctcctgggcagggctatggctgccccttttgttggagtgttggagaccctgcctctacttgtttccacccatccctccaagccagagcttagccatataacaagagctcggtaatgaaccctcctgggtgcaatgctgggtggtgacccagagtcaccttctccatccccgttgccctgacagccactcttttggggcaggcagatgaagagactgaggttccaagagtgtctgtcacttgcccaatatggagaggtacaaccagacagtcccaagaggccctggtaccttgccctggctctcaagggaggaaccagctgagggtagcatgtcctggccccaaagctgactgctaccatgctgtcccatgtctctacccactgttcccagtgaagactgaggccctatcccctgccaggggccaggcaacagggacacctttcttcttgcttctgggccaacagccacagccctgggaggcagagcccagacatgcctggtgacttcagggctgatgctccctccttcctcccaccccgtcgctcactccccatgttgttccggatggagtggggctgtgccctgacaggcagccagtccgctgtctggccatcatctcctgtctctgaggaaattcccagaatgcaccctggaaggaacggaaaaaagcagcaaagaaagtgagaaagaaaaagcaacagagaacagacagaaacaaccaaatttgatgccaagaggctgagaagtgcagaagcgggtggcaggggtccccaggaggttgatttgtccctctcgtggtggggtcaccagagcctggagtgggagtgaagccttgaggctctggccacctctcccttgccaactccatgctaccccctagtggcctcagtgtcagctgcaggaccaggactggggatgtcggaggggacctgtccgggcggcagggagccccacttattgctttcctaacgttcctctgcccctctctctgtctgtttccctaggcctctgcgggagaagatgaagccggaaaggaggagacccaagggcagggggaagaggaggagagagaagcagagacccacagactgccacctgtgagtgcgcggggtcccagggatggcgaggaggctgggcccgaggggagccccgccttgccgccagggttaggttggggagggggagagggcaggactgaggccagtcttgggggcagaacgggagctgcacctcctcaagactctagggcccaggaagcatcagtggaccttggtttttgtcccggcttagccctaggtttccattgaccttcaacaaatcatttcacctttgtcagcctagcttttctctgtgtagaatgaggggcaggaggtccagcaaacattcagtcactctacaaacatttactgagcacttactgtgtgtcaggtacatctgtgagcaaacaaacaggattcctgcacattagtgtttaccttttagtgattaaaagtctgtcatcagctgagacgttatctggggccacttcctagtagccccggggaacatgtgcccctcgccactgtctcccaggagtatttttgcctgtgggtccccttgctgcttctaacccacttcgtaccttgtgggcagcagaatggagccccaggcctgagtgtggctgggagagaaggatgagaggagggaaaacccaaatctgtgagagtaaatagaaaaaataaaatatttcacgtgcacagtcaatcagtcactgaagagaggtggctctccttcaggggctaagcctcccccacgcacgtgactccaggaagtcatttcgtgctatggagtggagttgacccaagccctgaccccatgagccccactccatgaagacagggatcctggggactgcgccccctaggggtttatgctttcatctcttttctgggcccgcgcggcaatttgggaaacaagctggcagggaagtccatccaggcccgagttacccgccggcagccggaggcagaaagtgtcccgtggctcctgttcccaaggcagcagtcttcagacatttcactcgggaatctcctgaaagaatttcaaaagtggccgggcgcagtggctaacacctgtaatcccagcactttgggaggccgaagtgggtagatcacttgaggtcagaagttcgaggccagcctgaccaacacggtgaaaccacatctctactaaaaatacaaaattagctgggcgtgttggtgcatgcctgtaatctcagctacttgggaggctgaggcaggagaatcgcttgaacccgggaggcggaggttgcagtgagccgagatcacgccactgcactccagcctgggtgacagagcaagactccgtctcaaaaaaaaaaaagaattccaaaagcccatgtgctcccttgcccattcttaagttgacattgaacattttcatcagaattataagtcaagccaggctcagtacctcatgcctgtaattctagcactttgggaggccgaggcgagtggatcgcttgaggccaggagttcaagcctagccggggcaacatggcgaaacctcgtctctacaaaaaaaatacaaaaactagctggacgtggtgccatgtgcctatagtcccaactactcaggaggctgaggtggaatgatcacctgagcctgggaggtcaaggctgcagtgagccgagatagatccactgcacctcagcctgggtgacagagtaagaacctgtctc

SEQ ID NO: 18201 - DNA, 4793 bp, Homo sapiens
  CDS (13)..(1887)
attggatcaaacatgtcacaagagtcggacaataataaaagactagtggccttagtgcccatgcccagtgaccctccattcaatacccgaagagcctacaccagtgaggatgaagcctggaagtcatacttggagaatcccctgacagcagccaccaaggccatgatgatcattaatggtgatgaggacagtgctgctgccctcggcctgctctatgactactacaaggttcctcgagacaagaggctgctgtctgtaagcaaagcaagtgacagccaagaagaccaggagaaaagaaactgccttggcaccagtgaagcccagagtaatttgagtggaggagaaaaccgagtgcaagtcctaaagactgttccagtgaacctttccctaaatcaagatcacctggagaattccaagcgggaacagtacagcatcagcttccccgagagctctgccatcatcccggtgtcgggaatcacggtggtgaaagctgaagatttcacaccagttttcatggccccacctgtgcactatccccggggagatggggaagagcaacgagtggttatctttgaacagactcagtatgacgtgccctcgctggccacccacagcgcctatctcaaagacgaccagcgcagcactccggacagcacatacagcgagagcttcaaggacgcagccacagagaaatttcggagtgcttcagttggggctgaggagtacatgtatgatcagacatcaagtggcacatttcagtacaccctggaagccaccaaatctctccgtcagaagcagggggagggccccatgacctacctcaacaaaggacagttctatgccataacactcagcgagaccggagacaacaaatgcttccgacaccccatcagcaaagtcaggagtgtggtgatggtggtcttcagtgaagacaaaaacagagatgaacagctcaaatactggaaatactggcactctcggcagcatacggcgaagcagagggtccttgacattgccgattacaaggagagctttaatacgattggaaacattgaagagattgcatataatgctgtttcctttacctgggacgtgaatgaagaggcgaagattttcatcaccgtgaattgcttgagcacagatttctcctcccaaaaaggggtgaaaggacttcctttgatgattcagattgacacatacagttataacaatcgtagcaataaacccattcatagagcttattgccagatcaaggtcttctgtgacaaaggagcagaaagaaaaatccgagatgaagagcagaagcagaacaggaagaacgggaaaggccaggcctcccaaactcaatgcaacagctcctctgatgggaagttggctgccatacctttacagaagaagagtgacatcacctacttcaaaaccatgcctgatctccactcacagccagttctcttcatacctgatgttcactttgcaaacctgcagaggaccggacaggtgtattacaacacggatgatgaacgagaaggtggcagtgtccttgttaaacggatgttccggcccatggaagaggagtttggtccggtgccttcaaagcagatgaaagaagaagggacaaagcgagtgctcttgtacgtgaggaaggagactgacgatgtgttcgatgcattgatgttgaagtctcccacagtgatgggcctgatggaagcgatatctgagaaatatgggctgcccgtggagaagatagcaaagctttacaagaaaagcaaaaaaggcatcttggtgaacatggatgacaacatcatcgagcactactcgaacgaggacaccttcatcctcaacatggagagcatggtggagggcttcaaggtcacgctcatggaaatctagccctgggtttggcatccgctttggctggagctctcagtgcgttcctccctgagagagacagaagccccagccccagaacctggagacccatctcccccatctcacaactgctgttacaagaccgtgctggggagtggggcaagggacaggccccacagtcggtgtgcttggcccatccactggcacctaccacggagccgaagcctgagcccctcaggaaggtgccttaggcctgttggattcctatttattgcccaccttttcctggagcccaggtccaggcccgccaggactctgcaggtcactgctagctccagatgagaccgtccagcgttcccccttcaagagaaacactcatcccgaacagcctaaaaaattcccatcccttctttctcacccctccatatctatatctcccgagtggctggacaaaatgagctacgtctgggtgcagtagttataggtggggcaagaggtggatgcccactttctggtcagacacctttaggttgctctggggaaggctgtcttgctaaatacctccagggttcccagcaagtggccaccaggccttgtacaggaagacattcagtcaccgtgtaattagtaacacagaaagtctgcctgtctgcattgtacatagtgtttataatattgtaataatatattttacctgtggtatgtgggcatgtttactgccactggcctagaggagacacagacctggagaccgttttaatgggggtttttgcctctgtgcctgttcaagagacttgcagggctaggtagagggcctttgggatgttaaggtgactgcagctgatgccaagatggactctgcaatgggcatacctgggggctcgttccctgtccccagaggaagccccctctccttctccatgggcatgactctccttcgaggccaccacgtttatctcacaatgatgtgttttgcctgactttccctttgcgctgtctcgtgggaaaggtcattctgtctgagaccccagctccttctccagctttggctgcgggcatggcctgagctttctggagagcctctgcagggggtttgccatcagggccctgtggctgggtctgctgcagagctccttggctatcaggagaatcctggacactgtactgtgcctcccagtttacaaacacgcccttcatctcaagtggccctttaaaaggcctgctgccatgtgagagctgtgaacagctcagctctgagtcggcagactggggcttcctcctgggccaccagatggaaagggggtattgtttgcctcactcctggatgctgcgttttaaggaagtgagtgagaaagaatgtgccaagatacctggctcctgtgaaaccagcctcaggagggaaactgggagagagaagctgtggtctcctgctacatgccctgggagctggaagagaaaaacactcccctaaacaatcgcaaaatgatgaaccatcatgggccactgttctctttgaggggacaggtttaggggtttgcgttcgcccttgtgggctgaagcactagctttttggtagctagacacatcctgcacccaaaggttctctacaaaggcccagatttgtttgtaaagcactttgactcttacctggaggcccgctctctaagggcttcctgcgctcccacctcatctgtccctgagatgcagagcaggatggagggtctgcttctagctcagctgtttctccttgaggttgcggaggaattgaattgaatgggacagagggcaggtgctgtggccaagaagatctccgagcagcagtgacggggcaccttgctgtgtgtcctctgggcatgttaacccttctgtggggccaaaggtttgcatcgtggatccagctgtgctccagtctgtcccctcctcctccactctgactgccacgccccggaccagcagcttggggaccctccagggtactaatggggctctgttctgagatggacaaattcagtgttggaaatacatgttgtactatgcacttcccatgctcctagggttaggaatagtttcaaacatgattggcagacataacaacggcaaatactcggactggggcataggactccagagtaggaaaaagacaaaagatttggcagcctgacacaggcaacctacccctctctctccagcctctttatgaaactgtttgtttgccagtcctgccctaaggcagaagatgaattgaagatgctgtgcatgtttcctaagtccttgagcaatcatggtggtgacaattgccacaagggatatgaggccagtgccaccagagggtggtgccaagtgccacatcccttccgatccattcccctctgtatcctcggagcaccccagtttgcctttgatgtgtccgctgtgtatgttagctgaactttgatgagcaaaatttcctgagcgaaacactccaaagagataggaaaacttgccgcctcttcttttttgtcccttaatcaaactcaaataagcttaaaaaaaatccatggaagatcatggacatgtgaaatgagcatttttttcttttctttttttttttttttttttaacaaagtctgaactgaacagaacaagactttttcctcatacatctccaaattgtttaaacttactttatgagtgtttgtttagaagttcggaccaacagaaaaatgcagtcagatgtcatcttggaattggtttctaaaagagtaaggcatgtccctgcccagaaacttaggaagcatgaaataaatcaaatgtttattttccttcttatttaaaatcatgctaatgcaacagaaatagagggtttgtgccaaatgctatgaacggccctttcttaaagacaagcaagggagattgatatatgtacaatttgctctcatgttttt

SEQ ID NO: 18202 - protein, 625 aa, Homo sapiens
MSQESDNNKRLVALVPMPSDPPFNTRRAYTSEDEAWKSYLENPLTAATKAMMIINGDEDSAAALGLLYDYYKVPRDKRLLSVSKASDSQEDQEKRNCLGTSEAQSNLSGGENRVQVLKTVPVNLSLNQDHLENSKREQYSISFPESSAIIPVSGITVVKAEDFTPVFMAPPVHYPRGDGEEQRVVIFEQTQYDVPSLATHSAYLKDDQRSTPDSTYSESFKDAATEKFRSASVGAEEYMYDQTSSGTFQYTLEATKSLRQKQGEGPMTYLNKGQFYAITLSETGDNKCFRHPISKVRSVVMVVFSEDKNRDEQLKYWKYWHSRQHTAKQRVLDIADYKESFNTIGNIEEIAYNAVSFTWDVNEEAKIFITVNCLSTDFSSQKGVKGLPLMIQIDTYSYNNRSNKPIHRAYCQIKVFCDKGAERKIRDEEQKQNRKNGKGQASQTQCNSSSDGKLAAIPLQKKSDITYFKTMPDLHSQPVLFIPDVHFANLQRTGQVYYNTDDEREGGSVLVKRMFRPMEEEFGPVPSKQMKEEGTKRVLLYVRKETDDVFDALMLKSPTVMGLMEAISEKYGLPVEKIAKLYKKSKKGILVNMDDNIIEHYSNEDTFILNMESMVEGFKVTLMEI

SEQ ID NO: 18203 - DNA, 6634 bp, Homo sapiens
  CDS (57)..(5657)
actggcaaggatcgcctgcatatgttgctgacttagtcttagccaaccaacaaattatgagccagattttgtctgctctgggcctgtgtaatagcagtgccatggcaatgataattggagcaagtggattacatctcactaaacatgaaaactttcatggtgggttggatgccatatcagttggggatggattatttaccatactgacaacccttagtaaaaaagcttctacagtccacatgatgctgcagccaattttaacatacatggcctgtggatatatgggcagacaaggctctcttgctacttgccagttatctgagccattattgtggttcattttgagagtattggatactagtgatgccttgaaagcatttcatgatatgggtggtgttcagctcatatgcaataatatggttactagtacaagggctattgtgaacactgcaaaaagtatggtatcaactattatgaaatttcttgactctggtccaaataaagctgttgacagcacattgaaaacaagaatactagcttctgagcctgacaatgctgaagggattcataactttgcacccctcggtacaatcacatctagcagtcctactgcccaaccagctgaagtgctattgcaggccacacctcctcacagaagagctcgctctgctgcttggtcctacatctttcttccagaggaagcttggtgtaaccttaccattcaccttcctgcagcagtgctgcttaaggagatacatatccagcctcatcttgcatctcttgcaacctgcccttcctcagtgtctgttgaagtaagtgcagatggggtaaatatgctacctttgtccactcctgttgtcacaagtggcctcacctacataaaaattcagcttgtaaaagccgaagtagcttctgctgtctgccttagactacatcgtccacgggatgccagcacattaggcctttcacaaattaaattattggggctcactgcttttggtaccacctcttctgcaacagttaataatccattccttccatctgaagatcaggtatccaaaacaagtattggatggttacggttattacatcattgccttactcacataagtgatctagaaggaatgatggcaagtgcagctgcacctactgctaatctgctgcagacttgtgcggccttattgatgtcaccttactgtggaatgcattcacccaacatcgaggttgtgcttgtaaagataggactgcagtctactagaattggcctgaagctcatagacattctcctgagaaattgtgcagcatcaggcagtgatcctacagatttgaatagtcctttactttttggaagactaaatggactctcttctgactctacgatagatattctttaccagcttggaacatctcaggatcctggtacaaaagacagaattcaggccttgttaaaatgggttagtgattctgcaagagtggctgctatgaagagaagtggcaggatgaactacatgtgtcctaactcctcaacagtagagtatggtcttctgatgccatctccttctcatttgcactgtgtagcagccattctgtggcatagttatgagctgcttgtagaatatgacttaccagcactcctggaccaagagctctttgagttactttttaattggtccatgtctcttccctgcaatatggttttgaagaaagctgttgacagtctactttgctcaatgtgtcacgtacacccaaactatttttctttgctcatgggctggatgggaattacccctcctccagtgcaatgtcatcatagactgtccatgacagatgatagcaaaaagcaggatcttagttcatctttaacagatgactctaaaaatgcacaagcacctctcgcattaactgaatcacatttggctacccttgcttcctcttctcaatctcctgaagctattaaacaattactagactcaggtttgccttctcttcttgtgaggagtctggctagtttctgctttagccacatttctagctcagaaagcattgcccagtcaatagatatttcccaggacaaactcaggcgccatcatgtcccacaacaatgtaataagatgcctatcacagccgacctagttgctcctattcttaggtttttgacagaagttggcaatagccatattatgaaagattggcttggtggttctgaagtcaatccactatggacagcacttctgtttttattgtgtcactctgggtccacttctggaagccataatttaggtgcacaacagaccagtgcaagatcagcttctctttcttcagctgctacaacaggactgactactcaacagcgcacagcaattgagaatgcaactgttgcgttctttctacagtgcatttcatgccatcctaataatcaaaagctgatggcacaggttctttgtgaactatttcagacatctcctcaaagagggaaccttccaacatctgggaacatttcagggtttatacgaagattatttttacagttgatgctggaagatgagaaagtgacaatgtttcttcagtctccatgtccactgtacaaaggtagaattaatgctactagccacgtcatccagcatccaatgtatggagcaggccacaaattccgtactcttcatttgccagtctcaacgacattatcagatgttcttgacagagtgtcagatactccaagtatcacagctaaattaattagtgaacaaaaagatgacaaagaaaagaaaaaccatgaagagaaagaaaaagttaaagcggaaaatggatttcaagacaattacagtgttgttgttgcctctgggctgaagtctcaatctaaacgtgctgtgtcagctacaccacctcgcccaccatccaggagggggaggacaatacctgataaaataggaagtacttcaggagcagaggctgccaacaaaataattactgtcccagtgtttcacctgtttcacaaactcttggcaggccagccattgccagctgaaatgacacttgcccagcttttaactctcctatatgaccgaaaacttcctcagggttaccgctcaatagatctgactgttaaattgggatcaagagttataacagaccccagtctatcaaaaacagattcttataaaagactacaccctgaaaaagatcatggagacttacttgctagctgtccagaagatgaggctctcactccaggtgatgaatgcatggatgggatactggatgaatctttgcttgaaacctgtccaattcagtcaccattacaagtttttgcaggaatgggtggactggctcttattgctgaaagactatccatgctatatccagaagtaattcaacaggtgagtgctccagttgtaacatctaccactctggaaaagccgaaggatagcgatcagtttgaatgggtgaccattgaacagtcaggggagttagtttatgaagcaccagaaactgttgcggctgaacctccacctattaagtcagcagtacagaccatgtctcccatacctgcccattctttggctgcttttggattatttcttcgtcttccgggctatgcggaagtgctactgaaagagagaaaacatgcccagtgccttcttcgattggtattgggagtgacagatgatggagaaggaagtcatattcttcaatctccatcagccaatgtgcttccaacccttcctttccacgtccttcgtagcttgtttagcactacacctttgacaactgatgatggtgtacttctaaggcggatggcattggaaattggagccttacacctcattcttgtctgtctctctgctttgagccaccattccccacgagttccaaactctagcgtgaatcaaactgagccacaggtgtcaagctctcataaccctacatcaacagaagaacaacagttatattgggccaaagggactggctttggaacaggctctacagcttctgggtgggatgtggaacaagccttaactaagcaaaggctggaagaggaacatgttacctgccttctgcaggttcttgccagttacataaatcccgtcagtagtgcggtaaatggagaagctcagtcatctcatgagactagagggcagaacagtaatgcccttccttctgtacttctcgagcttctcagtcagtcctgcctcatcccagccatgtcatcttatctacgaaatgattcagttctggacatggcaagacatgtgccactctatcgggcactgctggaattgcttcgggccattgcttcttgtgctgccatggtgcccctattgttgcccctttctacagagaacggtgaagaggaagaagaacagtcagaatgtcaaacttctgttggtacattgttagccaaaatgaagacctgtgttgatacctataccaaccgtttaagatctaaaagggaaaatgttaaaacaggagtaaaaccagatgcgtctgatcaagaaccagaaggacttactcttttggtaccagacatccaaaagactgctgagatagtttatgcagccaccaccagtttgcggcaagcaaatcaggaaaaaaaactgggtgaatactccaagaaggcggctatgaaacccaaacctttgtcagtattaaagtcacttgaagaaaaatatgtggctgttatgaagaaattacagtttgatacgtttgaaatggtttctgaagatgaagatgggaaattgggatttaaagtaaattaccactacatgtctcaggtgaaaaatgctaatgatgcgaacagtgctgccagagctcgccgccttgcccaggaagctgtgacgctttcaacctcactgcctctgtcttcatcctctagtgtgtttgtacgctgtgatgaggagcgacttgatatcatgaaggttctaataactggtccagcggacaccccttatgcaaatggctgctttgagtttgatgtgtattttcctcaagattatcccagttcaccccctcttgtgaatctagagacaactggtggtcatagcgtgcgattcaatccaaacctttataatgatggcaaggtttgtttaagcatcttaaacacgtggcatggaagaccagaagagaagtggaatcctcagacctcaagctttttgcaagtgttggtgtctgtccagtcccttatattagtagctgagccttattttaatgaaccgggatatgaacggtctagaggcactcccagtggcacacagagttctcgagaatatgatgggaacattcgacaagcaacagttaagtgggcaatgctagaacaaatcagaaacccttcaccatgttttaaagaggtaatacacaaacatttttacttgaaaagagttgagataatggcccaatgtgaggagtggattgcggatatccagcagtacagcagtgataagcgggtaggcaggactatgtctcaccatgcagcagctctcaagcgtcacactgctcagctccgcgaagagttgctgaaacttccctgccctgaagacttggatcctgacactgacgatgccccagaggtgtgcagagccacaacaggtgctgaggagactctaatgcatgatcaggttaaacccagcagcagcaaagaactccccagtgacttccagttatgagctgcattgatgtggacttcatagacacaaaggcttcgaagcacaagccaaatatgtcaatatttgtatgtaagaaactaattatgtaataggtaatgaaactgaaactatactatgcccttaaggagatccagtttaattcaaggtgatcttttatttacctgtacaggagtgtaaacttttttgtgcttttattttttcaattgtgagaaccactgattggtatgttcaacaaatttgtgtatacaaagaaatggataaatcactgctatataagggaaagtaccttaggaaagaatgtttactgaatgtttatttattttttttttttttttactatagagtgaggggttgttaacaaagaatatatattggtcattcttacaactactatttaaagtcagcaacttttcactgaatttgatagattttatgtttggccatatcttcatgctcacatttgatttctgaagacctcctacatacacttcaataaaagttaaatggacatactccctcttttttgatttactggtacatttttaaaataataaatctgccataaaatgcattatatctggagacttgcacttgtatggatgaatttattacattcaacatatttaattttatgccttctaattctaagatgcagaaaaaaataaatgaacatgattttattctatgccaacatttgggcctctgaatgtatctgttatttgaatttaagtatttgaaaaggaatggtcaatttgaaagtcattctaaactgatttttttttttctaaagggctccttttttcctggactatgtggttttatgactaaagtcacatgtatgtattaaacattgaggctctgtagaggagagaggatgtacctctctggtgctgttacagtacattctgtacctgccatacaggctcattttcatgcaaattcttcctagagccaaataaataatgacttaggtg

SEQ ID NO: 18204 - protein, 1867 aa, Homo sapiens [sequence omitted]

SEQ ID NO: 18205 - DNA, 1569 bp, Homo sapiens
  CDS (41)..(1342)
gtttgacgatgagagtgatggggaagaagaggaggagctcatggatgaggatgtggaagaagaggatgactcagagatctcagggtacagcgtggagaatgccttcttcgatgagaaggaagacacctgtgctgccgtgggggagatctctgtgaacaccagtgtggccttccttccatacatggaaagtgtctttgaagaagtatttaaactgctggagtgccctcacctgaatgtgcggaaggcagcccatgaggctctgggtcagttttgctgtgcactgcacaaggcctgtcaaagctgcccctcggaacccaacactgctgctttgcaggctgccctggcccgagtcgtgccatcctacatgcaggcagtgaacagggagcgggaacgccaggtggtgatggccgtgctggaggccctgacaggggtgctccgcagctgtgggaccctcacactgaagccccctgggcgcctcgctgagctctgtggcgtgctcaaggctgtgctgcagaggaagacagcctgtcaggatactgacgaggaggaggaagaggaagatgatgatcaggctgaatacgacgccatgttgctggagcacgctggagaggccatccctgccctggcagccgcggctgggggagactcctttgccccattctttgccggtttcctgccattattggtgtgcaagacaaaacagggctgcacagtggcagagaagtcctttgcagtggggaccttggcagagactattcagggcctgggtgctgcctcagcccagtttgtgtctcggctgctccctgtgctgttgagcaccgcccaagaggcagaccccgaggtgcgaagcaatgccatcttcgggatgggcgtgctggcagagcatgggggccaccctgcccaggaacacttccccaagctgctggagctcctttttcccctcctggcgcgggagcgacatgatcgtgtccgtgacaacatctgtggggcacttgcccgcctgttgatggccagtcccaccaggaaaccagagccccaggtgctggctgccctactgcatgccctgccactgaaggaggacttggaggagtgggtcaccattgggcgcctcttcagcttcctgtaccagagcagccctgaccaggttatagatgtggctcccgagcttctgcgtatctgcagcctcattctggctgacaacaagatcccaccagacaccaaggccgcactgttgctgctcctgacgttcctggccaaacagcacaccgacagctttcaagcagctctgggctcactgcctgttgacaaggctcaggagctccaggctgtactgggcctctcctagactgcaggctgcagccagtccagagagaatagagcctgcccaggccttaagaccacctctcagcccagttcagttctgccttaccaaagattctgagactcatacccatttggagccagccccacttgctgccttacagggctgtccctgaggctggatctgttacaaatgagtcatgacatcatactgtaataaaagcagcttgttttctgcttgaacaatag

SEQ ID NO: 18206 - protein, 434 aa, Homo sapiens [sequence omitted]

SEQ ID NO: 18207 - DNA, 1616 bp, Homo sapiens
  CDS (1)..(729)
atgaaccacgagtgggtggggaacgactggctgcccagcctggggctgccccaataccgcagctacttcatggagtcgctggtggacgctcgaatgttagatcaccttaacaagaaggagctccggggccaactcaagatggtggacagctttcacagggtgagtctacattatgggattatgtgcctgaaacggctcaactatgaccggaaggacctggagcggaggcgggaagaaagtcagacccagatccgagacgtgatggtgtggtccaatgagcgggtcatgggttgggtgtccgggctgggcctgaaggaatttgccacgaacctcacggagagcggggtacacggggcactgctcgccctggacgagaccttcgactactccgacctggccttgctcctgcagatccccacgcagaatgcacaggcccggcagcttctggagaaggaattcagcaaccttatctccttaggcacagacaggcggctggacgaggacagcgccaagtctttcagccgctccccatcctggcggaagatgttccgggagaaggacctccgaggcgtaactcccgactcagctgagatgttgccccccaactttcgttcggctgcagcgggagccctgggctctccggggctccctctccgcaagctgcagccagaaggccagacttctgggagttcccgggcagacggcgtttcggtccggacctattcctgctagtgcaggcctccaggtgaggaccgtgctgggcgaccttgggggtgcggggcggcacggtggatcttcactgctccacgcgctgcccggcgtcatgcatgtgacctcactcggacggaagaatcttcccgaggctgggctgttccctctcctgcccggactgtggcctcgccggggagagcgggcgggggagctcgcgccgaggactggaccatctgtacagaccagcgggagtgcgcgcgcccgcctcgcacagggccggggcctggaccaaaccacatgaactggactgagagggggaagaagcggggaggaagaaatcccgccccaaacgtccgctttccttttctctactttgtaatttattgatcagtttctgttgggagacgggtgtcctttacccgcgggaagggggcggggcttccctcccgggccgcatgcggggagaggctgctccctccccttttttcctgcccagtcgcggggcccaagtcttccttcttcgtccgaaaggaggggaggggggactcgctgctacaagcctcgccccctgtgccactcagctccgccccgccgcgtccggtcgccggtcccccgggtcatctgcgggcggggtcccctctccctcccccgtgtctcgtgtccccggggcctcaccgccccccgtgctgtggccgtgtccgtgccccgggggtagggggcgcagaatggcgcttccccttctcctctggctccggggtttgcatgggagaatcctctttccacgatgccgctgggcgacgtggcgtgggggcagggggacggtgggggagccctcgcccccgactctcggtcggcctccccgccccaggcgtcactcagtgatcacgggtaaagagaactgtttc

SEQ ID NO: 18208 - protein, 243 aa, Homo sapiens
MNHEWVGNDWLPSLGLPQYRSYFMESLVDARMLDHLNKKELRGQLKMVDSFHRVSLHYGIMCLKRLNYDRKDLERRREESQTQIRDVMVWSNERVMGWVSGLGLKEFATNLTESGVHGALLALDETFDYSDLALLLQIPTQNAQARQLLEKEFSNLISLGTDRRLDEDSAKSFSRSPSWRKMFREKDLRGVTPDSAEMLPPNFRSAAAGALGSPGLPLRKLQPEGQTSGSSRADGVSVRTYSC

SEQ ID NO: 18209 - DNA, 1405 bp, Homo sapiens
aagtgattcttccacggccaaactagaggcacagagctggaaaaacttcatccccactcagcacatactagggaggtaacttgccagctttgctttgggtcatagttcttacagctaacttatgtgttccagaaaatttaccgagaaatcgacgttgacaggtctggtaccatgaattcctatgaaatgcggaaggcattagaagaagcaggtttcaagatgccctgtcaactccaccaagtcatcgttgctcggtttgcagatgaccagctcatcatcgattttgataattttgttcggtgtttggttcggctggaaacgctattcaagatatttaagcagctggatcccgagaatactggaacaatagagctcgaccttatctctgtgagtcagcaggccccgccttgcttctaaggggatgggggaggcatggggcggaaagggctgttacttgagtgatctgctttttcaagttttgctttaaagagctcttggtctgtcggggccaggcctgtaaccggttgtaagatcccacaatgcacttttacttgcagttgttttccaaccacctattctcaagtccaaaatgcacgcctggctccctcttctcatgagctttgacttgagtgtagctcaaggttaaactaaggagtggctgcaggatcatgcttagaaaaatgaactcctgattagcatgcaagggagaacatgtttatataaagaaatccttcagctgaaattcaagttgggttttgggaagatccatcattcttagagtggatctacttaaaatactttaagcaaattagttttctctactccctccccgtttaagataaaactaatactagtaaatacgtttgccatttattattgttattgcactcatgtgtctggaaccctagcaatacacatctctgaaatgatcatcaatctgaattaagtgggtatgctaatttcacaaaaagcaaagcgtaaaatgttctcgtgtcatcccaatgacaggaagttctctcactgaaagaaagaagccaggtggggtatacttccattatcacctggctccagtcagcatttcctctatactcagggaaggccacagagggccgggcgaagtggctgacactgggtgagaatggcagttgtcagtcctgtccgtgtaacagaggagtgaagtggtgaggagggcaggtctaaggcactggcagctcttttccatggattttgaactctggaggaaggcagcaactaaataactgtctcattctgctattatgcattgtattagcaaagtgaaaatatagtctatctggttacaaataacactaacttgcttaaaactttacatatcctaggaaatatctctacccctagattgcaatgtagagtcaaccccatctct

SEQ ID NO: 18210 - DNA, 2374 bp, Homo sapiens
  CDS (177)..(1703)
cacaccccatctgggggaaggacaggagctggacaggccaagagctatctcccttggctggagaagaccgggaaaaagggagtactggagccaggaaggaagaagagggagggccagtgctggtaaaggagaagttgggcctgaagaagttagtcctcacccaggagcagaagaccatgttgttggattggaatgactccatccctgagagtgtgcacctcaaagctggggagcgaatttcccagaaaagtgctgagaatggtagaggaggccgtgtgctaaaaccagtccgccccctgctgctccctagggcagcaggagagcccctgccaacccagagaggggctcaggagaagatggggacccctgcggaacaagctcaaggggagcgaaacgtgcctccacccaagtccccactgcggctcatagccaatgccatccgaaggtctctagagcccctcctttccaactctgaaggcgggaagaaggcctgggccaagcaagaatccaaaactttgcccacacaggcctgcactcgctcattcagccttcggaaaaccaattccaataaagacggggaccagcattcccctgggagaaaccagtcctcagcctttagccctcctgaccctgccctccgcacccacagtttgcccaatcggccatccaaggtctttcctgcacttaggtccccaccctgcagcaagattgaagaagtccccacactcctcgagaaagtgagtttgcaagagaacttcccagatgcttctaagcctccaaagaaaagaatctcacttttttcctccctcagactcaaagacaaatcttttgagagtttcctccaagaatccagacaaagaaaggacatcagggacctctttggcagccccaagaggaaggtgctgcctgaagatagtgcgcaggccctggagaagctgctgcagcctttcaaaagcacctccctgcgccaggcagctcctcctcctcctcctcctcctcctcctcctcctcctcctcctcctccccctacagcgggaggtgcagactccaagaactttcccctcagagcacaggtaacagaggcttcctcttctgcctcttcaacctcctcctcctctgcagatgaagaatttgatccccagctttccttgcagttaaaggagaagaagacacttagaagaagaaagaagctagaaaaagcaatgaagcagttggttaagcaagaagaattgaaaagactctataaggctcaggccatccagaggcagctggaggaggtggaggagcggcagagggcttctgagatccagggtgtgaggctggagaaggcgttgcgaggagaagcagattcaggcacacaggatgaagcacagcttttgcaggaatggtttaagctggttctggagaagaataaattaatgcgatatgagtcggagctcctaatcatggcccaggaactggaattagaagatcatcaaagcagactggagcagaaactgagagagaaaatgctcaaggaggagagccagaaagatgagaaggatctaaacgaagagcaagaagtattcaccgagctgatgcaagtgattgagcaaagggacaaactcgtcgattccttagaggaacaacgcatcagagaaaaagccgaggaccagcactttgaaagcttcgtattctccagaggctgtcagctgagcaggacttgaggaggcccgtagtccctctccctggctgcacgttgggaccggatcaggccaagtgcaccacacaccctcatgggtctttctgcaggatttatcatccctggaacttaagttataccttactgcattttttaaaattaaaattctcttgcacgcatggcagcttcccaaggttcttccagagattcaaatgaagaaaacccaaagactctttggcaattggcagtcaacttcagccaggctctcagactggaggtgttgttggcagatgaccagcattgttttccctagaaagtgacacaaagacttgactttcctgctacttttatcattttccttcccaattcattgagttacatactttaagatttttgagaagctgccttttcattaatatatccatatttgcctttttttgtatggatgaccagtttccaaatgtcagaaagaagcagccgcagtttaaagattaggttaatatttaaattgtgtttccagagaaagaggagaaaccttgagattactgattacataaagcaaataactcatatagcaggtgttaattcaatccagggtgaatttaatttaccaggtgcatttataagccttaatataatatacataagcaatgagagcttaatagaacatttgagccttaattttattttaag

SEQ ID NO: 18211 - protein, 509 aa, Homo sapiens
MLLDWNDSIPESVHLKAGERISQKSAENGRGGRVLKPVRPLLLPRAAGEPLPTQRGAQEKMGTPAEQAQGERNVPPPKSPLRLIANAIRRSLEPLLSNSEGGKKAWAKQESKTLPTQACTRSFSLRKTNSNKDGDQHSPGRNQSSAFSPPDPALRTHSLPNRPSKVFPALRSPPCSKIEEVPTLLEKVSLQENFPDASKPPKKRISLFSSLRLKDKSFESFLQESRQRKDIRDLFGSPKRKVLPEDSAQALEKLLQPFKSTSLRQAAPPPPPPPPPPPPPPPPPTAGGADSKNFPLRAQVTEASSSASSTSSSSADEEFDPQLSLQLKEKKTLRRRKKLEKAMKQLVKQEELKRLYKAQAIQRQLEEVEERQRASEIQGVRLEKALRGEADSGTQDEAQLLQEWFKLVLEKNKLMRYESELLIMAQELELEDHQSRLEQKLREKMLKEESQKDEKDLNEEQEVFTELMQVIEQRDKLVDSLEEQRIREKAEDQHFESFVFSRGCQLSRT

SEQ ID NO: 18212 - DNA, 2105 bp, Homo sapiens
  CDS (114)..(815)
attcctcgctccaaggggcagacaggacaggctgaaaatagcaactggttccaaaaagataaaggggatgactccagcagagcacctcactcctttgaagagcacagaggaagatgtcagcccagtcccttcctgcagcaacaccccccacgcagaagccccctcggatcatccgcccccgccctccttctcgttccagggctgcccagtccccagggcctccccacaatggctcctctccacaagaactaccccgaaactccaatgatgcaccaaccccaatgtgcactcccatcttctgggagcccccagctgcatccctcaagccccctgctcttttgcccccctcggcttctagagccagcctcgactcccagacttccccagactcaccttccagcacccccacacctagtccagtgtcccggcgctccgcctccccagaacctgctccccggtctccagtccccccacccaagccgtctgggtcaccctgcacgcctctgctccccatggctggagtcctggctcagaatggctctgcctcagctcctggcactgtgcggaggctggctggcaggtttgaagggggtgctgaaggccgggctcaggatgcagatgccccggagccaggtctccaagcgagagcagatgtgaatggggagagagaagctcccctcaccgggagtgggtcccaggagaacggtgctccaggtgagtgtggcgggtggggggcgctgggtgacctcaatccacccatcttctccgttttcagtgctaacaactttcaggggctaccttttcaaaaatggagttaatgtttgggatatctggtttctgtatgtcgggatttgaagggagtcagggtggaggagatctatagatgcctggaccttgatattgcagttgctgggcaggttaaagatggagatggtctgggcgggggtggagctgggccccaagggctttctccttaggctacctgtctcccacagatgctggcctggcctgccctccctgctgcccctgtgtctgccacaccacccggcctggcctggagctcagatgggtgcctgtggggggctatgaggaggtccccagggtcccccgtcgggcctccccgctgcggacctctcgctcccgcccccaccctccaagcatcggtcaccctgccgttgtcctcacatcctaccgctccactgctgagcgcaaactcctgccacccctcaagcctcccaaaccaactcgtgtcaggcaggatgccaccattttcggggaccccccacagccagatcttgatctgctttctgaagatggaatccaaacaggtgcagggcctgggggagtggacctctgggctgtgaggggacaggagagaggcaggggggaactaaagcccagcaaactacaatccccaacaggcactgggctctttgcttccccaccagctgctgctctggtgctgaagagagttgcagtttttatagtaaccgtccctgctggggctggagtcgggagtcctggctggggatcctggagtttttttttctcttcactctggcttctctctccaggggacagtcctgatgaagctcctcagaatactcctccagcaactgtggaggggaggtactgaacacccccacccctactccctggttctctccccaccatgcttctacctgagggcagactaaccttcagctccagctaaaccccacctccacaaaggtgaggggacaagggccagggctctagagataagcagcccttgtttcgaatcccagctctggcccttatcaattctgtgatcttatagaaggccgggcacggtggcttacatctgtaatcccagcactctgggaggccgcggcagaaggatcacctgaagtcaggagttcaagatcagcctggctaacgtggtgaaaccctgtctctactaaaaatacaaaaattagccgggcatggtgacgggtgcctgtaatcccagctactcgggaggctgaggcaggagaatggcttggacccagggagatggaggttgcagggagccaagagcgtgccactgcactccagcctggtcgacaagagagaaactccatctc

SEQ ID NO: 18213 - protein, 234 aa, Homo sapiens
MSAQSLPAATPPTQKPPRIIRPRPPSRSRAAQSPGPPHNGSSPQELPRNSNDAPTPMCTPIFWEPPAASLKPPALLPPSASRASLDSQTSPDSPSSTPTPSPVSRRSASPEPAPRSPVPPPKPSGSPCTPLLPMAGVLAQNGSASAPGTVRRLAGRFEGGAEGRAQDADAPEPGLQARADVNGEREAPLTGSGSQENGAPGECGGWGALGDLNPPIFSVFSANNFQGLPFQKWS

SEQ ID NO: 18214 - DNA, 2184 bp, Homo sapiens
  CDS (9)..(1334)
tggtgctgatgtgtgaactgtctcgggaggatgcccctgtgcgctggtacaaggatgggctggaagtggaggagagcgaggccctggtgctggagagggatgggccacgctgccgcctggtgctacctgctgctcagcccgaggacgggggcgagtttgtatgtgatgctggagatgactcggccttcttcactgtcactgtcacagccccaccagagaggattgtgcacccggcagcccgctccctggatctgcattttggggctccagggcgcgtggagctgcgctgtgaggtggccccagctgggtctcaggtgcgctggtacaaggacgggctggaagtggaggcatcagatgccctgcagctgggtgccgaggggcccacccgcaccctgaccctgccccacgcccagcctgaggacgccggggagtatgtgtgtgagacccggcatgaggccatcaccttcaatgtcatcctggctgagcctccagtgcagttccttgctctagagacaactccaagcccgctctgtgtggcccctggggagccagtggtgctgagctgtgaactgtcccgggctggcgcccccgtggtctggagccacaatggggggcccgtgcaggagggcgagggcctagagctccatgccgagggcccccgccgagtcctctgcatccaggctgcaggcccagcccatgcagggctctacacctgccagtctggagcagcccccggagccccaagcctcagcttcaccgtccaggtggctgagccactgctggtgaagctggtctcggacctgacaccactcactgtccacgagggcgatgatgccacgttccggtgtgaagtctccccaccagatgccgatgtcacctggctgcgcaatggggccgtcgtcactccagggccccaggtggagatggcccagaatggttcaagccgcatcttaaccttgcgaggctgccaactgggggatgcagggaccgtgactttgcgggcagggagcacggccacaagtgcccggctccatgttcgagagacagagctgctgttcctacggcggttgcaggatgtgcgggcagaggaaggccaggacgtgtgtctcgaaatggagacaggccgagtgggtgcagcgggggccgtgcgctgggtgcgaggtgggcagcccctgccccacgactctcgcctgtccatggcccaggatgggcacatccaccgcctcttcatccatggtgtcatactggccgaccagggcacctacggctgcgagagccaccacgatcgcaccctggccaggctcagcgtgaggcgtgagtgccccgtcctctcttaatgcattacccaccctacaccacagccttttctggctgtcctggagtccctcaggcccccaccaaagtgcccctcatcgctgagaaaagtcacccatggccgtcccagcagcagcttgcccaaagcaaaacttttctttttctaatattttttatttaccttagaaatccatgtggattttgcattccattgcatatttccaagtcggctttgctataaacacaaatattctccagaaagacttgccatgggcatccttcaggcatgtattctagggatacacatacccacttaagtagcagggatggctgtcaaacagcaccccacacctcccacccaaagctggagccctctgtttcctatgtgacctcatgcaagttaacctctttgagccaagtctccttaaaaatggggctgagaccaggtgcagtggctcacgcctataatcctaacactttgggaggccaaggcaggaggatcccttgaggccaggagttcgaggccatcctgggcaacatagcaagaacccatctccacaaaaaaaaataaaaattagccgggcatggtagttactagggaggctgaggcagaaggattgcttgaacccaggaggttgaggctatagtgagctatgatcatgtcacggcattccagcctgggtgacagcaagaccctgtctcaaattttaaaaatggggttgatccccgtctcaagtgtctctgggaacattaactgagataacatgaaaattcttacacagagcttggtgaatggttgtcattggtgacacatctcttctaacttatttcattcaagaaatcatcacaataaacctgtgtcccaatgtt

SEQ ID NO: 18215 - protein, 442 aa, Homo sapiens [sequence omitted]

SEQ ID NO: 18216 - DNA, 2345 bp, Homo sapiens
  CDS (281)..(598)
agacctgaaggctgcttccgctaacccgggctggcgctgctaacctcacccaacgatccctgctgtcggaaaatgtccagaggcaccatccctgctatgaagagggaatgccagtacaacagccacaaggggtcttcctgtggccctcaaacaaaaaatcactgcattacatcagcagactgcattggagagaaaggcgccgggacagaaaagcctgagataaaccacctgtcattcttggagaaaaggatgctgcggctttcccgatttggttgatgagatggaaaatcaacccttacaggaaggacatcaccaattccggaaaggatgctgcgccagtcatgtttccgcactctgtgagacgttgaaatctccagaagttgcccaaggttttcaagctgaacacaggagaaatgactctggatctctgaggactgttttcctcaataaggagctgcaatcttggctccaccaccctccctccaaaacatctcctgtgtctggtatctggttatattgtggcctgacagagaagtttctttcggggccagtgaatttaaaaaaaaaaaaaaaagaaaagcgggtcctaccaactcattaatactttaatactttaaatttccctctttatagtaggttgaaatgtcagtatctcttaagaacaatggctgaaccaaatgtttcctcaaaactcacattttttcccaccatttcagaagctgcctcaggactaagctttgatttttttttttttttttaatctggcccaaattcctatctaaggggcctggggagtcatgcccaacaaaccataaattctcatcagatgagttttatttaaccctatatatggtgacttgctttccagtctgactctggcatgacatgtgacaaagaagaaagtcaaaatattttaccccaaaacatgtttctttgccatattttgaaatggtcctgcaaagctgtgctttgtgggggaaaatatgcatctgtaaagaatctctattaacacagctagatctttttcttccaggccctcccaatcctgaagagactgagagtctagcattgttttaaaggtctgaataggaaacatttgtcatctatcatctctaagggtagccattataagacttcaaaagaaccttttgaagtattataatcttttatcttacctgaacatgtgcttcctattgatcccaggtcttcagacaattgtgaactcaaccatttgtcaattagaaaatgtttaaattggctgggcacagtgtctcatgcctctaatcccagcactttggaagaccaaggcgggcagattgcctgacctcaggagttcgagaccagcctgggcaacatggtgaaaccccgtctctactaaaatacaaaaatttagccgggcgtagtggcatgcacctgtagtcccagctacttgggaagctgaggaaggagaattgcttgaacccggcgggcggaggttgcagtaagcagagatcgtgccactgcactccagcttgggcaacaaagtgagactccatcacagaaaaaaaaaagaaaatgtttacctttacctatagcctggaaatccctgctttgagttgctccatctttctgaaccaaaccaatgttatttcttaaacgtatttcattgatgtctcatgcctccctaaaatgtataaaaccaagctgtgccccgaacaccttgggcacatgttctcaggacctcctgagggccgtgtcacgggtcataatcactcatatttggctcagaataaatctcttcaaacattttacagagttgactcttagtcaacatgtccatacctgatgagatgcttcatcagaattctagtggactggctagttcagaaaatggaccagccaggtttgcttaaatgcacccctgcacaactatctcactcctgcttggagccggctagatcaggagacctgtccctaaactaatgtactccatgtcttaagtctttttgttttgttttgtttttgtttttgacagagtctcagtctgtcacccaggctggagtgcagtggcgtgatcttggctcgctgcaacctccgcctcccgggttcaagagattctcctgtctcagcctcccaagtagctgggacaacaggtgtgcaccaccatgccctgctaatttttgtgttttaagtagagatggggtctcaccctgttggccaggctggtctcgaattcctgacctcaggtgatccgcccacctcggcctcccaaagtgctgtaattacaggcatgagccaccgcacccagcccatgtgtcttggtcttttttactaatattgattataaaatggatgaaactttggat

SEQ ID NO: 18217 - protein, 106 aa, Homo sapiens [sequence omitted]

SEQ ID NO: 18218 - DNA, 2159 bp, Homo sapiens
  CDS (434)..(1495)
tatagaccaccagatttcttctggtgaaaacaccagatcagtgattccaaatgatatttcaagtaatgctgcaattttaggaggacagccgccaaatgtgacaagcaattctggaattctgggagtccaaagaccaaatgtatcaagtaattctgaaattcttggggtccggccatctaatgtttccagtagttctgggattattgcagcccaaccaccaaatattctaaataactctggaatattgggaatacagccacccagtgtgtcaaatagttctggacttttgggagtgctacccccaaatatacctaacaattctggacttgtaggagtacagccaccaaatgttccaaatactcctggacttctgggaacacagccaccagctggacctcaaaacttaccccctttaagtatccctaatcaaaggatgcccacaatgccaatgttagacattcgtccgggactaataccacaggcacctgggccaagattccctttaatacagcctggaattccaccccaacggggaatcccacccccatcggtacttgattcagctcttcatccaccaccccgtggaccttttcctccaggagatatttttagccaaccagaaagaccttttttagctcctggaagacaaagcgtagacaatgttactaacccagaaaaaaggataccacttgggaatgataacattcaacaggaaggagatagagattaccggtttcctcctatagaaaccagggaaagcattagtagacctccccctgtggatgttagagatgtggttgggcggcctatagatccaagagaaggtcctggacggcctccactagatggtagggatcattttggaagacctcctgtagatataagagagaatcttgtgaggccaggtatagatcatcttggtcgaagagaccactttggctttaatccagagaagccctgggggcatagaggagattttgatgagagagagcatcgggttctaccggtctatggtggtccaaaaggcttacatgaagaaagaggtagatttcggtctggaaactatcgatttgatcctagaagtggtccttggaaccgaggatttggacaagaagttcacagagattttgatgaccgcagaagaccctgggagaggcaaagggatagggatgacagagattttgatttctgcagagaaatgaatggaaatcgtcttggacgagacagaattcaaaacacttgggttccccctcctcatgctcgggtttttgattattttgaaggggccacttctcaacgaaaaggtgataatgtgcctcaggttaatggtgaaaatacagagagacatgctcagccaccacctataccagtacagaatgatcctgaactttatgaaaaactgacatcttcaaatgaaataaacaaggagaagagtgacacagttgctgatatagaaagtgaaccagtggtagaaagcacagaaactgaggggacataatcatcactcagtaggtaaaagataccttttgtaaagttgtcatctctctgtaatagataatggctgactggaccatagttgttcacttttgtctgccagaattaagttaatctgatgttcatgttcacctttctcttaaaataattgtacaactgacttgtatagacattgttcttaatatgaacatggtaggtaaactttttttttatttttttctgataaaatacaaatgttggccccagattcttttaacgtcaaggaaatgaataacagcttgtcagagacttcctatggaagaaagaattttttagatactatcattaggttggatatggtaataggtatatttcagaatagcaagtggtggtatatcttatccatatctttaggctgctgcagaattttaaggttatagataaagctgtgatattttatgcaaagactggctctaggtatttgaggagcacaatacagagattttaaaaagtgattttgtaaaatctacactacggtctctgtttctccaaagtaagtgtttgtgatttgttcctcatactgcagtgagtaaaaaagaaacaagaaaacaacaacataaatattaaagtacgtttcaatgttgggtgaattttgtttttagatgccaataaaacttatttgtttg

SEQ ID NO: 18219 - protein, 354 aa, Homo sapiens
MPTMPMLDIRPGLIPQAPGPRFPLIQPGIPPQRGIPPPSVLDSALHPPPRGPFPPGDIFSQPERPFLAPGRQSVDNVTNPEKRIPLGNDNIQQEGDRDYRFPPIETRESISRPPPVDVRDVVGRPIDPREGPGRPPLDGRDHFGRPPVDIRENLVRPGIDHLGRRDHFGFNPEKPWGHRGDFDEREHRVLPVYGGPKGLHEERGRFRSGNYRFDPRSGPWNRGFGQEVHRDFDDRRRPWERQRDRDDRDFDFCREMNGNRLGRDRIQNTWVPPPHARVFDYFEGATSQRKGDNVPQVNGENTERHAQPPPIPVQNDPELYEKLTSSNEINKEKSDTVADIESEPVVESTETEGT

SEQ ID NO: 18220 - DNA, 2416 bp, Homo sapiens
  CDS (174)..(1421)
gtcgtgatcagacgagcggtgagcgatcgatactcctatgctagcctctggctcctcaggggacacagccgagtggtcggaccaaacgcaacgagtcttcgccagcccaaaggcgactcgacaccgtcccagctgaagagaggcatgggactgaaccagctggtggtggcccgatggctggagacacccactgccccgcagagcccctggccagagaaggcactttatgggaggccctcagggcgctcctgccgcacagtaaagaagacctgaagttggacctcggggagaaagtggagaggagcgtggtgacattgttgcagcgagccactgagctcttctacgagggcaggagggacgagtgtctgcagagcagcgaggtgatcctgggctactcctgggagaagctcaacacgggcacatggcaggacgtagacaaagactggcgccgggtctacgccatcggctgcctcctgaaagccctgtgtctgtgccaggcacctgaggatgccaacactgtggccgcagccctgcgggtctgtgacatgggcctgctgatgggggcagccatcctgggggacatccttcttaaagtcgctgccatcctccagacacacctccctggaaagaggcctgcccgtggctccctcccagagcaaccctgcacaaagaaagcaagggcggaccatggtttgattccagatgtgaagttagaaaaaacagtcccccggctgcaccgtccgtccctccagcatttcagggagcagtttttggttccagggaggcccgtgatcctgaaaggcgtggctgaccactggccgtgcatgcagaagtggagtttggagtatatccaggagatcgctggctgccgaactgtcccagtggaagttggttcgaggtacacagatgaggaatggtcccagaccctcatgacggtcaacgagttcatcagcaaatacatcgtgaatgagccaagggacgtcgggtaccttgctcagcaccagctctttgaccagatcccggagttgaagcaggacatcagcatccccgactactgcagcctgggcgatggggaggaggaggaaatcaccatcaatgcctggtttggtccccagggaaccatctccccactacatcaggatccccagcaaaacttcctagtgcaggtgatggggaggaagtacatccggctgtattccccgcaggagtcaggggctctgtaccctcatgacacgcaccttctccataacacgagccaggttgacgtggagaatcccgacctggaaaagttccccaagtttgccaaggccccattcctgtcctgcatcctgtctcctggagagatcctgttcatcccggtgaaatactggcattacgtgcgggctctggatttgagcttctcggtcagcttctggtggtcgtagccaggataggagctgaaagggcctgacatgcagacagcattcatctgttcactaatttcctgggtcctggaatctatagagacaagcaggactgaacctgtgtcctgaagagccttcactgcccagtggcagccctggggggctgagctccagcactgggcaggcacagagcaggggctgcccaggaaggagcacactccaggccaggggtgcatggcagaggaaggtggggagagcccagaaggacattgcagacagacagcctgcatggggactccggcatcagaaagccgaatgtttttgggaaacgggtgggtcacacaggcaggggtgaaacatgggctctgaggttggctacctgattcaaacccggccgcgctgcgcacctgctgggtgacttggccaggatcccccacttcgctgtgcccatatggaaaagagggcaaggccagtcctcactgccgagggccgagaaggcggtgccgagcccctgctgctgcatgaaccttagccgctgtcactgatcccaattactctgatccttttgcccttccttcccataacggcctgctggacgccacagcctgaatactggagagagctgggcattgcccaggtcacaggagagagtccgtagagacctgcgcaggagccgggacccctgctgagcagtgggagctttctgtcatccccatggctcaaggataacctacctgcctgcagagaagagcgaaggtcttgctggatgacttttcacccgcactcacccaggagcaggctcccaagtgaagaaaccaccaaaccatcaccagctcctagaagcctccctcccaccaccttctagtcaccatcccccagaagtaatgactctcaaacctgggggatttgaggccagggggagagccaggctctatgctttctgtaattgtgtctcgtttgtgtgcacgcaggtttgttttatgttttggccattaagattttccccagccctc

SEQ ID NO: 18221 - protein, 416 aa, Homo sapiens
MAGDTHCPAEPLAREGTLWEALRALLPHSKEDLKLDLGEKVERSVVTLLQRATELFYEGRRDECLQSSEVILGYSWEKLNTGTWQDVDKDWRRVYAIGCLLKALCLCQAPEDANTVAAALRVCDMGLLMGAAILGDILLKVAAILQTHLPGKRPARGSLPEQPCTKKARADHGLIPDVKLEKTVPRLHRPSLQHFREQFLVPGRPVILKGVADHWPCMQKWSLEYIQEIAGCRTVPVEVGSRYTDEEWSQTLMTVNEFISKYIVNEPRDVGYLAQHQLFDQIPELKQDISIPDYCSLGDGEEEEITINAWFGPQGTISPLHQDPQQNFLVQVMGRKYIRLYSPQESGALYPHDTHLLHNTSQVDVENPDLEKFPKFAKAPFLSCILSPGEILFIPVKYWHYVRALDLSFSVSFWWS

SEQ ID NO: 18222 - DNA, 2362 bp, Homo sapiens
  CDS (296)..(1348)
tttattacaaagtgaagaaaacaagaacttggatttagagccatgtaccgggttccaaagaaaactaatttatcagactttgagctggaagtatccgaaaggcattcatgttgagactttagaaactgaaaagaaggagcgatatatagttatcagcaaagtagatgaagaagaacgcaaaagaagagagcagcagaaacatgccaaagaacaggaggagctgaatgatgctgtgggattttctagagtcattcacgccattgctaattcgggaaaacttgttattggacacaatatgctcttggacgtcatgcacacagttcatcagttctactgccctctgcctgcggacttaagtgagtttaaagagatgacaacatgtgttttccccagactcttggatactaaattgatggccagcacacaaccttttaaggatatcattaacaacacatcccttgcggaattggaaaagcggttaaaagagacacctttcaaccctcctaaagttgaaagtgccgaaggttttccaagttatgacacagcctctgaacaactccacgaggcaggctacgatgcctacatcacagggctgtgcttcatctccatggccaattacctaggttcttttctcagccctccaaaaattcatgtgtctgccagatcaaaactcattgaacctttttttaacaagttatttcttatgagggtcatggatatcccctatctaaacttggaaggaccagacttgcagcctaaacgtgatcatgttctccatgtgacattccccaaagaatggaaaaccagcgacctttaccagcttttcagtgcctttggtaacattcagatatcctggattgatgacacatcagcatttgtttcccttagccagcccgagcaagtaaagattgctgtcaataccagcaaatatgcagagagctatcggatccaaacctatgctgaatatatggggagaaaacaggaagagaagcagatcaaaagaaagtggactgaagatagctggaaggaggctgacagcaaacggttaaacccccagtgcataccctacaccctgcagaatcactattaccgcaacaatagttttacagctcccagcacagtaggaaagagaaatttgagtcctagtcaagaggaagctggcctggaggacggagtgtcaggggagatttccgacactgagcttgagcagaccgattcctgtgcagagcccctctcagagggaaggaaaaaggccaagaaattaaaaagaatgaagaaggagctttctccagcaggaagcatctcgaagaacagccctgccacactctttgaagttcctgacacatggtaaccaagacctgagggcagcaaaccgctggtgctgtcgctgtgagcaagagccggctggcacatttggaagccgcactgtatttaacttaatcaaatgtggtatgggaggggttggaaaccaagttgtctcctgggggggagaaaacaggttttatttttgtggctgtggttttttcccctttttaatctaactgcctgttgacattgacactcatcacggttgtaggctgtcatgaatgtgtacgtgcttaaccagtgaattccgtgttgctcttgtgaggcctttcctgtcatgacccagtgtgcttaagaacctgcctgatggggagtgtcggctgtgaaatctgcaaaaagagctgacattccagctgctgtgatcatgaatttgggggtgtactgtcctgcctgtgcatcttctcgcactgagattttgaggcagttgcagccctcggttagtctcccagtggaaaaatcggttgtgcctccctgcttcccaccatagctgcctgaaaacatgacgctctcaagcttgtccttccttcaggaagatgtccactcatgcccacccatgagagggcttgccgtatgccctggcctttgggcatatttatgtagagttcctttctcctaagacgtgagtttctcatgggggatgtacgagtaaaaaggttaacttctgttcttatgcgtggcgctgtgttcactttccagagtctctgttcgtttgtttggatggcggtctcggggtacggcagcgtgtgtgcgtacgtgtctgtgtgtgtgtgtgtgtgtgtgtgtgtgtgtgtgtgtgtgtgtgaaatcgtgcaaatctacaacatgtcccagcccattctccgttgaaacagatcacagcaacgacaaacgctcatggcgctgctttgctccacccgcttcagatagatcattgttagatatttcacatttttgtatggtggaaataaaaatgaaaaatgtatttccaaaagatgaaaattaaaaacattttcatagg

SEQ ID NO: 18223 - protein, 351 aa, Homo sapiens
MLLDVMHTVHQFYCPLPADLSEFKEMTTCVFPRLLDTKLMASTQPFKDIINNTSLAELEKRLKETPFNPPKVESAEGFPSYDTASEQLHEAGYDAYITGLCFISMANYLGSFLSPPKIHVSARSKLIEPFFNKLFLMRVMDIPYLNLEGPDLQPKRDHVLHVTFPKEWKTSDLYQLFSAFGNIQISWIDDTSAFVSLSQPEQVKIAVNTSKYAESYRIQTYAEYMGRKQEEKQIKRKWTEDSWKEADSKRLNPQCIPYTLQNHYYRNNSFTAPSTVGKRNLSPSQEEAGLEDGVSGEISDTELEQTDSCAEPLSEGRKKAKKLKRMKKELSPAGSISKNSPATLFEVPDTW

SEQ ID NO: 18224 - DNA, 2567 bp, Homo sapiens
  CDS (418)..(1857)
cacccccccccccccggccattaccgaagcggatgaaaacaaacactaacgatggcggcgccgggaagcgaccggctgctgggcttaaggcgggagtgaccgcttaaccagtgagggaagcactgaagagcgccagtcgacgtgggtgcgacaactcgcggagtcttaggagcaaaacgtctggggcctgcgagccaggacccttctgaagccttaggtgtctatcggcgacgtgtacggtcactgcagctccggagcgcggaaccctcagccaggaggcgcggctggtcggtcccaggtcccggcctccgtaatgagagcccggaaccactctttgtgccgcagcttcgcagtggaacgacctgtggaaacctgtgatccattctcattaaataaatctctggattcctataggcaatggaaactgatctcaattcccaggacagaaaggacctggacaagtttattaaattttttgccctcaagactgtccaagtgattgtccaggctcggcttggtgaaaagatttgcactcgttcatcatcttctccaacgggttcagattggttcaacttagcaatcaaagacatcccagaggttacacatgaagcaaagaaggcactggcaggacagctgcctgcagtcgggaggtccatgtgtgtggagatttcacttaagacttctgagggagattccatggagctggaaatatggtgtcttgaaatgaatgaaaagtgtgataaagaaatcaaagtttcctacacggtgtacaacagactgtcattgctgctgaagtcccttcttgctataactagggtgacaccagcctataggctctccaggaaacaagggcatgaatatgtcatattatacaggatatattttggagaagttcagctgagtggcttaggagaaggcttccagacagttcgtgttgggacagtgggcacccctgtgggcaccatcactctttcttgtgcttacagaattaacttggcattcatgtctaccaggcaatttgagaggaccccacctatcatggggattattattgatcactttgtggaccgtccctatcccagctcctctcccatgcacccctgcaattacagaactgctggtgaggacactggagtaatatacccgtctgtagaagactctcaagaagtgtgtaccacctctttttccacctccccaccatcccagctgatggttcctgggaaggaaggtggggtaccccttgctcccaaccagcctgtccatggtacccaggctgaccaggagagactggcaacctgcaccccttctgacagaacccactgtgctgccacaccctccagtagtgaggatactgaaaccgtatcaaacagcagtgagggacgggcctcccctcacgatgtcttggagaccatctttgtccgaaaagtgggggcttttgtcaacaaacccattaaccaggtgaccctgacgagtttggatataccctttgccatgtttgctcccaagaatttggagctggaggataccgatccaatggtgaatcctccagattccccagagactgaatctcctctccagggcagcctgcactcagatggctccagcgggggcagcagtggcaatacccatgatgactttgttatgatagactttaaaccagctttttctaaagatgacattcttccgatggacctggggaccttctatcgggagtttcagaacccacctcagctgagcagcctctccatagatattggagcacagtccatggctgaagacttggactcattaccagagaagctggctgtgcatgagaagaatgtccgcgagtttgatgcctttgtggaaaccctgcagtaaaagtatccttgagtcccagcagcaccccctttttgtggccccagggcataagcagcctcccatgcatcagctgctcccacccctcatcctgctctgagccaggtggaagggaggctggcttctcccatggggacccagaagtccctactcttggacctcctggagactccgtggcggcagtcaagcccaatgcccagttggagaagactcacgtgctggccttggagatgggaagaaccttcgtacgaaaaagccctcagcagggccatctgtgtgccctgcccatcaccaactgcttcccaagggtgtcatcctgttcctcctgctgccggcctcctgcctgggcctgccttgcagctggccccttccctgcctgctgtcaccatccactgtttgacattccagctggtggccaagagattggtgtggaggcagaaagaggaaggagacagtgccaggaggaagaaggaaggagtcccttagctctcttcattgtcccctttacttcctgctatcttcttctcctcttcttctctctcttgcctctatgcctgtatttctggcaatatgacaggcctgcctacccaagatcagaactccaaaaccactcccacccctgaaggtcgggagggtctgagcagccctggtggctgcctgtgctcaggtcctcagctccatgggaaataaaaatggcaccctgaatctct

SEQ ID NO: 18225 - protein, 480 aa, Homo sapiens
METDLNSQDRKDLDKFIKFFALKTVQVIVQARLGEKICTRSSSSPTGSDWFNLAIKDIPEVTHEAKKALAGQLPAVGRSMCVEISLKTSEGDSMELEIWCLEMNEKCDKEIKVSYTVYNRLSLLLKSLLAITRVTPAYRLSRKQGHEYVILYRIYFGEVQLSGLGEGFQTVRVGTVGTPVGTITLSCAYRINLAFMSTRQFERTPPIMGIIIDHFVDRPYPSSSPMHPCNYRTAGEDTGVIYPSVEDSQEVCTTSFSTSPPSQLMVPGKEGGVPLAPNQPVHGTQADQERLATCTPSDRTHCAATPSSSEDTETVSNSSEGRASPHDVLETIFVRKVGAFVNKPINQVTLTSLDIPFAMFAPKNLELEDTDPMVNPPDSPETESPLQGSLHSDGSSGGSSGNTHDDFVMIDFKPAFSKDDILPMDLGTFYREFQNPPQLSSLSIDIGAQSMAEDLDSLPEKLAVHEKNVREFDAFVETLQ

SEQ ID NO: 18226 - DNA, 2110 bp, Homo sapiens
gcacgtcagctgtcagatacgaaaggtagatatcaggtaagaatctggacttaggaaatagtcacaaaactgtcataggttgtaattttatcaacattcgcttctagtaaaattaaagtcaattaagaaatagaacttgggtcaaaattctgttacaaagcttcataatttgtcccgaagcatatggtggagcattctgagaaatttgctttttgtgtgtttgacattcctaatttgggagtccttcagctgaattactattcttttagaagttgagacagcaggtaagcaaaggacctagttcatgtaaacatggacatcatgatggctatttaaaaaatatttgttctacaccttctcccctgaggcttggggagtgtgttcagccgctgcagtttctctgctcatggaggtcttgtttggatctgtgctggcggctgagcatttagtgtgagccagtgacccatgaacttgccgctctgtgagggccagagtcagggccagtcatggtaatgggcctgaaggcacttccagaaccttttatgtctctcgtgagccatctgttaagaacgttcttcttggtgtggtttgtaggcctacctgtcgctattctgggaaaccttcttgagtgctatgcaaatgtgttcacaggcaatgggggtggtcctgagccttggggtgggcacctggtcagtgagtgtcttgcccttccccagctgggcatacagtaccttgctctttctggtggcatcatctggctgtgatgaatgaggtctaggaaataatttgcatgtgtcttgggggacacaacagtaacgagaggaaatacattattacagcaacttgcgacgtactaatacctgtcagtgttggcccccgtaaggtatgtaaggcacctgtgagtgccagtgagtgctggtgaaaggccaacatgtactagttatgtaagtattggtgtctgctttaaaaaaggagacccagacttcacctgtcctttttaaacatttgagaacagtgttactctgagcagttgggccaccttcaccttatccgacagctgactgttggatgtgtccattgtcgccagtttggctgttgcccggacaggacaggacctccattgggcgcagcagcaggtggcaggggtgtggcttgaggtgggtggcagcgtctggtcctcctctctggtgctttctgagagggtctctaaagcagagtgtggttggcctgggggaaggcagagcacgtatttctcccctctagtacctctgcatttgtgagtgttccctctggctttctgaagggcagcagactcttgagtatactgcagaggacatgctttatcagtaggtcctgagggctccaggggctcaactgaccaagtaacacagaagttggggtatgtggcctatttgggtcggaaactgcatgtttcagaaagtttgtctctttttcctactcattatttgaagaagagagagcctgtggggatagccttatcttggtccacaggactgaagtgaagtcacttgggaaggggagacagaggatgagcggcgtctgtgtagggacccccccccgggcctgcagaagggtggtgtgctcccaggactggcatgacaggtgtctcctcctcaccacaggctgtgcccatgagtccctatgcagaccagtgggcaaggcagctgggccagatctcaggccagccgtttgtgctcctagcagggttgctgtgctggccacacggagaggccctagagagcctcatggattgtaactaaagaagaaacggttcctttttgtttttttaaaaatgatttttaaataccgttttttacaccgttctctcggtactttttttaagctaagtcagcattgtcttccagtgttaaaggcatccctcacctctgcattgaacttacgtatccatgccaaggaatggaatttccatcctgagccagttcagttaggtgtcaattgatactattttaattttttatgcaatctgatgagatgagctcagatttaaaaatctcaaaagcacgtttattgtaacaagaattgttatgtattaatactgcagttttcaataaagattgacttgtgttgc

SEQ ID NO: 18227 - DNA, 2173 bp, Homo sapiens
  CDS (721)..(1380)
cacttccccgatcgggccgtgtccgccgcggccctgcgaggtccgaggggcaatagccctctggaacaagacaattcatgtgagataagaaagaagagcccacaagaccaaggatgtattctcagtttacagaccactgaccagaggccactccagggtgtcaggactaagagaagtcacaaaacagcagatttcccaagagcagcggaaaatgacccagtcacagatatcatttgaggatgtggctgtggatttcacgctggaggaatggcagctacttaatcctactcagaagaacttgtacagagatgtgatgttggagaactatagcaatctggttttcttggaagtctggctagataatcccaaaatgtggctccgagataatcaagacaaccttaaaagtatggagagaggccataaatatgatgtttttggaaaaatatttaattcaagcataaacattgttcatgtaggactgcgatcccataaatgtggcacaggagaaaaaagtttgaaatgtccttttgatttgcttattccaaaaaataattgtgaaagaaagaaaattgatgaactcaataagaaattattgttctgtatcaaacctggcagaacccatggtgggataaaatactgtgattgcagtacatgtagaaaatccagcaacgaagagccatggctcactgctaatcacataacacacacaggagtctatttatgcatggaatgtggcagattttttttaacaagaagtcacaacttgttattcaccagagaactcatacaggagagaagccctatcaatgcagtgagtgtggaaaagccttttcacagaagtcactgctcacggttcatcaaagaactcactcaggagaaaaaccgcatgggtgcagcgaatgtcagaaagcttttagtaggaagtcactcctcattttacatcagagaattcatactggagagaagccgtatggatgcagtgaatgtggaaaagccttcagtaggaagtcgcagcttaaaagacatcagataacgcacacaatagagaaaccctacagttgcagtgagtgtgggaaagcattctcccagaaattaaaactcatcacacatcagagagcgcacacaggagagaaaccctatccatgtagtcactgtggaaaagccttcttttggaagtcgcagctgattactcatcagaggacccacacagggaagaaaccttacggatgtggtgagtgtcaaaaagccttcagcaggaactcacttctcattaggcatcagaggattcatacaggagagaagccctacgaatgcaacgaatgtggtgaagccttcatcagaaaaccacagctgattaaacatcagataactcacacaggttaaatatctgtggacaagaaacaggataatcagttactgagtgaagaaagacgggaatgatgtcccatactccccagctctctaaagtgttatgctgtacaattaaaatacccctgacccatcatctgctaccattcgttgtggataattcatgtaatctctaacctgtgggcaagtctttacccttcagtagtcaagattacgttagagacttcgtccacgaatccacaccacctttcccatcagttctcaccggaaatatgctgccaaaaagaaaatcagcttttctaagatcaagccagagttgcttctcttacaaccttacggcgctaatgcattaagttgaagtcgactgccaaagaggcccagcagagggcagcacccccatcatttttttgaatttctcccttaggaattttgccttcctttgtcttctgtccaccaggccttctctccagctggacacaaacctcctttgaagggaaataattgccgttaggcttcacagtagtgctttttcctttcacttggatttgcattttaacctgcatttcgaagatttttatacatgttttctatttccgacaatgccaggaggcttcattgacgttgtagtctgtgttaataaacttgtgtatcactctgctctgatcttttaggaattaacttgcaaatgaaatgaatatgttgggactttggcataatttgaatatagcattgtgtgagttgtgattgtctcttcctaattgtgctgtaataacctgtgtatgagaataaaatgatttccaccatc

SEQ ID NO: 18228 - protein, 220 aa, Homo sapiens
MHGMWQIFFNKKSQLVIHQRTHTGEKPYQCSECGKAFSQKSLLTVHQRTHSGEKPHGCSECQKAFSRKSLLILHQRIHTGEKPYGCSECGKAFSRKSQLKRHQITHTIEKPYSCSECGKAFSQKLKLITHQRAHTGEKPYPCSHCGKAFFWKSQLITHQRTHTGKKPYGCGECQKAFSRNSLLIRHQRIHTGEKPYECNECGEAFIRKPQLIKHQITHTG

SEQ ID NO: 18229 - DNA, 2027 bp, Homo sapiens
  CDS (65)..(412)
gtttgggtggtgaacagggatacagcaggcctcagtgaccaggcagagcccagtgaggtcaggcatggacaacgcacgcacattgggatgggaaggcctgctgttaactgggagagagaggaggaggaggtatggggatgactcccaaggaagggctttgcctaccttgatgggtttgctgggctgcgcctcagaaactggaggtcagtgccattcccatcagtgttcctactgccaggaaagtcttgcagtggctggctggccttcctgttcgactttctttccttgctcatcaaaacactttctctcccagcatcaactctacctgctccttctgcttaccacgcattccagtgactctgcccggttccaccggaagcggagttattttggaaggctggatggtgtacggtagggtggagggagccagaacgggaagccttggatggtggaaactcctctatcaccagggaacttggctgcagccccaagccctggcctcccaccagagcggggccgtccactttctccttctttttttagtactatcctctctgacccgcccagggctgggatgttgcagtgtgtttttccaagagacccggcaaacagcaacttgacaggttcaacggttcccattgacagcctgaatggactcctctgaaaactacgaaactggacacaaaaacagcccataaaaatcctgcctcccgcaggcgtctggacgctgccttttcccaaatgaccctccagcagcacggatgctgcatgggtggctaagcagcattttttgagtgattttcccaaaactggggtgttccaagtggtgtgggagtattattttttcccttgcagtaagagactaactcaccagataatttgagaaaacgggagactacatgagtcatgttactcccaaagctaatcacttgccactgtaccccaaagcctccatgaaccatgaggtgccccgggcctgcctgttatgaggtctggaactcactttaatataccgcagggaaggcagtgtgatgtttgtgtgtgccggtgagtttaagcttgaactcgatgagtgctctgcaaactttatagcacaaaggccactctctcaaggcagctcctacacgtccttctgccattgtgaccttgacctacaatccacacttcgctaatcagcatatcaaatgccaaaagcattttattagtgaaactggtaacttgttaattagaatgataaatagaatgctgaggaaaaagtaagcatcaattctctcatccaaaataaagtaatcacataatctagtctcggggacagctgaaaaattttatagtaaaaacagtgccggggagccaggcgcaatggctcacacctgttatcccagcactttgggaggccaaggtgggaggatcactcgagtccaggagttggagtccagcctgggcaacatagtgagaccctcccccatctcaataaaaaatacagaaattagctgggtgtgggggcatgtgccagtagccccagctacttgggaggctgagatgggaggattgcttgagtccaggaggttgaggctgcagtgaacaaagactgtgccactgcactccagcctgggcaacagagggagcccttgtctcaaaaagttaaattaaaaaaatttttaaagtgcagtgtacatataaaatggaatattttaatcatctcccaggttctcattggaaaggcagggttaaaaggaaatggaccaggccaggtgcggtggctcacgcctgtaatcccaacactttgggaggctgagtcaggcggatcacctgaggtcaggagtttgagaccagcctggccaacatggtgaaaccctgtctctaccaaaaataaaaaaattagccaggcatggtagcatgtgcctgtaatcccaggtacttgagaggctgaggcagggagaattgcttgaacccaggaggtggaggctgcagtgagccaagattgcgccactgtactccagcctgggtgacagagcgagactctatct

SEQ ID NO: 18230 - protein, 116 aa, Homo sapiens [sequence omitted]

SEQ ID NO: 18231 - DNA, 3334 bp, Homo sapiens
  CDS (64)..(1590)
gaaaaggaaatcgcagctgtgatttctcctgaactggagcatctagataaaacccttcccaccatgaataatctcatcagccaagataagcgtatcagctctaaccctgtggccaaaataatatatggtgacccagtgaccttcctgccccacctgccccggaaaagtgtggtccattgctctaagatttggagctgcaggaaaagaattacagttgagtacctccagcacattgtggaacagaaaaatggcaaagaaagagtgcccatcctctggcatttcctgcagaaggaagcagagctgaggctggtaaagttcctgcctgagattttggccttgcaaagggatctagtgaagcagttccagaacgttcagcaagttgaatacagctccatcagaggcttcctcagcaagcacagctcagatgggttgaggcagctgcttcacaacaggatcacagtctttctgtccacatggaacaaactgaggagatcgcttgagacgaacggtgagatcaacctacccaaagactactgcagcactgacttggatctggacactgagtttgagatcctcttgccacgccgacggggcctgggcctctgtgctaccgctctcgtcagctacttgattcgcctacacaatgaaattgtctacgccgtggaaaaactctccaaggaaaacaacagctattccgtggatgccgccgaggtcactgaactgcatgtcatcagttatgaagtggagcgggacctgactccactgattctctccaactgccagtaccaggtggaggagggcagagagaccgtgcaggagttcgatctggagaagattcagcggcagatcgtcagccgcttcctccagggcaagccccggctgagcctcaagggaatacccactctggtgtacagacacgactggaactatgaacatctctttatggacatcaagaacaaaatggcacaggactccctccccagctcggtcattagtgccatcagtggacagctgcagtcctacagcgatgcctgtgaagtgctgtctgtcgtagaagtcactctggggtttctgagcacagctggtggggatccaaacatgcagctgaatgtgtatactcaagacatcctgcaaatgggtgatcagacgattcacgtgttaaaggccttaaacagatgccagttaaaacacaccattgccctctggcagttcctgtctgctcataagtctgaacagctgctgcggctgcacaaagagccatttggggaaatcagttcaaggtacaaagcggatctgagcccggaaaatgctaagctcctcagcacattcctaaatcagactggcctagacgccttcctgctagagctgcacgaaatgataatcttgaaactaaagaacccccaaacccaaaccgaggagcgcttccgccctcagtggagcctgagagacactctcgtaagttacatgcaaactaaagaaagtgaaattcttcctgaaatggcatctcagttcccagaagagatactgctcgccagctgtgtctcagtgtggaaaacagctgctgtgctgaaatggaatcgagaaatgagatagaattatttcctcagctatctttggatgactttggagagaagactcctctctcctcgtctgcggcgtggacttgatcatggactggtgcctttgcattcagaaggagagctgtcagcgtagcaccgaattcaagaccaaggcgtgctacctgagctgacagctttttgaaagccgagctgtttctgaaccatgtacatacatgttctgaaactttctcatcattttatgagtactgttcattgagagatgacaatgaagattagatgaaattggaaataaaccaacattgtttacattccaggagacttgtagctcagccacacacgcagtaatgacctgtgcccgttcgcctctggcactgcccacccctctttttttttttcttctaattctgtactcacaaaagagaatctcattttcttctttcttccattcccttaaattctgagtactgtacatatatttctgggttcccacgatgatgtgaaaaactaccagactgttttttgtcttctcacaaagacaagaaaaatcagggcattttgtgagtgccttaagatcaaactaacaagatctgaccctctcccctcacagtgagccactgccccacttcagagggtaagagccaaaagcctcattgtgaaaggcactggacttggaccagggacaccatcagggccttggttttctcacgcataaaatggagagtggattaatcgccaaagattcttctgatctgacattttgaaattgtgagagaaactagatgactgtaaacttggtcacaggcctggttctggcagttctttgcggacttttttctagcattatgccaaataaacatgcagtctcagtgtgctctcgcatgtatgaatatctagtcctttctgtggttctcagccaagacataaaaactaggactcagagcacatacaaaaccagttatgtttcggaaagagggaaaagagtccccgagcccggatcttgtgctgcttttctcactgacgtgttgccttttttctttacaaaatctgctttgatacttaggacctctctggactaatttctcttcctagacagctcagcacagctattgatatgttagaggcagtatccttaatattcattctaaatgagttaacgacttaacttgaaattgggcctaaggagtgagaactacaaaaatacaaaatgcttgtccaggactcagccatgcacaccttgagcagcgccggcaggaggcacggaaggaactgtgctccgttctcctcactgtcatggtgccaccagtgtctgatgaagggcagagtgacccagactgcaggcagtaactgacttcacacagtccctggcatttagtcatctgtgattgttttatcactctggactgtgcagagccacctgccaccgagatctgcattccgactgcctatgaacgggtgtgggggccgggggctggcttgctgaagtcttcaacttgcactcggagctcctttgatacctcagagctggctgtcaggtggcagctcacacccagactcactggccacacctcagcagggggggagtcgagtgtcagtctctttctgtgaaggctttttttttcctttggcctgggaatttttcccatttttatgaaggggttttaaattgtttcattttgtgtgctgtgcttcaaagccttaactgtcaaatcttgcattatcttgtttgtacagaaatatactggcctagcagaggc

SEQ ID NO: 18232 - protein, 509 aa, Homo sapiens
MNNLISQDKRISSNPVAKIIYGDPVTFLPHLPRKSVVHCSKIWSCRKRITVEYLQHIVEQKNGKERVPILWHFLQKEAELRLVKFLPEILALQRDLVKQFQNVQQVEYSSIRGFLSKHSSDGLRQLLHNRITVFLSTWNKLRRSLETNGEINLPKDYCSTDLDLDTEFEILLPRRRGLGLCATALVSYLIRLHNEIVYAVEKLSKENNSYSVDAAEVTELHVISYEVERDLTPLILSNCQYQVEEGRETVQEFDLEKIQRQIVSRFLQGKPRLSLKGIPTLVYRHDWNYEHLFMDIKNKMAQDSLPSSVISAISGQLQSYSDACEVLSVVEVTLGFLSTAGGDPNMQLNVYTQDILQMGDQTIHVLKALNRCQLKHTIALWQFLSAHKSEQLLRLHKEPFGEISSRYKADLSPENAKLLSTFLNQTGLDAFLLELHEMIILKLKNPQTQTEERFRPQWSLRDTLVSYMQTKESEILPEMASQFPEEILLASCVSVWKTAAVLKWNREMR

SEQ ID NO: 18233 - DNA, 2161 bp, Homo sapiens
  CDS (116)..(820)
gttcacattagttgtgtctctggttcttgtcacaatctatgctgattatattgcccctttatttgacaaattcacacctctgcctgagggaaagcttaaagaagaaattgaagtaatggcaaagagtattgactttcctttgacgaaggtgtatgttgtggaaggatctaaacgctcttcccacagcaatgcttatttttatggcttcttcaagaacaagcgaatagttttgtttgacactctactagaagagtactctgtactaaacaaagacatccaggaggattctggcatggaaccccgcaatgaggaagaagggaacagtgaagaaataaaagctaaagttaaaaataagaaacaaggatgtaaaaatgaggaggtactcgctgtactaggccatgaactggggcactggaagttgggacatacagtcaaaaatatcattattagccagatgaattctttcctgtgtttttttttatttgctgtattaattggtcgaaaggagctttttgctgcatttggtttttatgatagccaacccactcttattggactattgatcatcttccagtttattttttcaccttacaatgaggttctttctttttgcctaacagtcctaagccgcagatttgagtttcaagctgatgcatttgccaagaaacttgggaaggctaaagacttatattctgctttaatcaaacttaacaaagataacttgggattccctgtttctgactggttgttctcaatgtggcattattctcatcctccactgctagagagacttcaagctttgaaaactatgaagcaacactgagatgtccaggatctgtgactgaagacatttctgattatttctgtcctggcagcatgttccagctcttgatgtttttaaacttttttttagaagaaaaattaagtacagaaaagcccagattttaaatacatttaatatgtcattttaaaaatgattttaataattcatttcttaaaacactgaatgaattttgaagcttaatgtttttaaaggcatagttttatctttgacatctaatttaccatcaagttgtaaaattatttggaaaaatacagaactcgttttatttgtatacttatatggaatctgcatgtgaggtgtttgagggcatatgtttgaaagagggagcatcaccacaggaatcctttctgtgaggtggaaacagtggtcctgaatcattgtgctcacacctaacttgaaatctggtcttactttcatgctgttatgatttcacctggtgaatcagtgttttaaataagaaaggtaatagttggtaaggccaatgttatttaaatgaaagtagttagaaaaatgctctcctattctaccaaatttttaatttctttcttccctttcttgctacacagtgatcaagagtttctcatagtgctttgaagttagaaattatgtataggatattttaaatcattgagttttgtggggtttttttgtttgtttgtttcttttgttttttggaaaatccgtgtctttatctttttttcccacgtggtagatatgatcccattggaggtaaattgtagcttcttctcattcatgcagtaaataatacatcctttcactcagcagagatggccatattaaacacgttttgctatgttaaaagtggcagaacaggaaagacgaattaaaaataacattttttaagcgacataaggatgaaatactgatgaatctctgtgacattacagggaaaaaaatatagttttctatctctttcaagggcagaagagttttcatttttatttttgtaattttatctgtaagtcataaatattacttaatcaggcctgattctacttttgaaaattacagttcttgaaatgcagataatgtttactttgaaaacaaatgtcatgaatgatttccagtttttaaagctatatgtttcactgcttcatatctctgtccactttctgaatgagaacttattttgtgcctagagctctcactcactgataatgcttattaccttctgggcatttattccaaagtgggatcaactgtacgcctttggtatctgaccataaagtcttttgctccgctgacatttgggtgatgtcttcacatggaaatataataaaaataaaaatctagttt

SEQ ID NO: 18234 - protein, 235 aa, Homo sapiens
MAKSIDFPLTKVYVVEGSKRSSHSNAYFYGFFKNKRIVLFDTLLEEYSVLNKDIQEDSGMEPRNEEEGNSEEIKAKVKNKKQGCKNEEVLAVLGHELGHWKLGHTVKNIIISQMNSFLCFFLFAVLIGRKELFAAFGFYDSQPTLIGLLIIFQFIFSPYNEVLSFCLTVLSRRFEFQADAFAKKLGKAKDLYSALIKLNKDNLGFPVSDWLFSMWHYSHPPLLERLQALKTMKQH

SEQ ID NO: 18235 - DNA, 2955 bp, Homo sapiens
cactcaaatcatgaagaatcctaaagcgaagaccacaggaatgggtgccatctatggcatggcccagacaactgttgacaggaatatggttgcagaattgtcctcagtcttcttggacagcttgtacagcaccgacactgtcacccagggcagccagatgaatggttctccaaaaccccactgaacttggaccctttctagtctcaaggggattccagccttcagaaggttcttgggatatggaacaggccgtgcacaactttgacatctggtcttgctccatagagcacaactcaagatagaccatgagacagcttgagcctcaggattcttgttcttcctcttatcttccttttgtggtttttaatttgaagaccccagagaattccattacataatgattttgcccttgttataaatgttaccctaggaattgttttaaccatttccttttctaaactctctagctttcaactttacttaaacattgtgtggtagctctgacctgtcctgattctttagagaagctggggtacagtttatgagatagctagagcttctttgttatctcaggcaggaggcgtttacataacagatgtttcctcagctgggtgtgaggtatactctaagcaggaggctttttcagccttctctctcttttttttttttttttttttttttgagatggaattttgctcttttgcccagtctggagtgcagtggcatgatctcagctcactgcaacctccacccactgggttcaagcgattcttctgcctcagcctcccgagtagctgggattaccggcacccaccaccacgcctggctaatttttcaattttctttttcagtagagacgggttcaccgtgttggccaggctggtcttgaactcctgacctcaggtgatacccgcccccccgcctcagcctcccaaagtgctgggattacaggcgtgagccaccgtgcctggccctgtctctcttaagagtaggttcattgtctgtcttagagtcacttctattgcaactcattttctttttccagggcacagatcgaccaagctgccgttccctattctgcaggacaggactattctagcatacctgcttcgtccacccaggcagggtttggggtggtctcttctgtgcctgcagtccccatttgacacttggttgccaccatctttggagattattgtttggaatgatgcttccattggctttttcttgttaccatggactaggaagaaaacatggtttccaaataatctgggagcttttggccatggtgccgccttcctgaattggcagtggtcagagcacacctgaaccctatcctgggctggtgatgagcagaaatcagacctttttctatgcttttttgaatatcagagtaggatgaacacccagattcaaatatgtcaccaaagttggtggtggtccttccctgcacccttgcgttaagccattatgtaatgaaaatgtgtttgcttgaaggaacagctcaaagcaccttcacaagttgccttgacttaccctaggtgggtgtgaaagagcacccgtagcaaggaaaattttctctattagtgtgttcttctgcctcttcccccttgattcagctttcagaggtactatggcagttttgcctcaggtgctgaacatttctcagccctggctaaaagggagcagcacagggagagaaacaggataggaaagcagaatggcgagcagcctatggcccagggcctgtaatcccttcccaagactagctgctcagggtggtgcagggacaggaccagaccctgcgcctatttcctgccttctttcccctatagggaactctgtaggctgagccactgtcctgctcttatgacattatatcttgtgcctttctcctcagcagtgagcagtgagctactcctggcccaggccctaggggaaatggatcagtctttgaggtttctatttggggaggggagtacttaagacgagtcaaaagacactttcctctgttccattccccatctcagggactcctgaatattcagcctctccaggctggtgtcttctagtttcccccactgggaatgctggctgggagagccatgactaccagacttttcctcaggctccttggcatgttagtctgaattgttcttgagcactgtactactgacccaacaactgtgactagctggccacgccattcagggctggtgtggcatttatgtgtgtgtgtgtgtgtgtgtgtttttcctgtttgcccagcagtgcattgtgggttccaagagtgggtagtgtgtgtatgtgtgtgtgtcagagggagacctggcaggcacctctttgagagtagctgtggtcagagctgtttggtcagtgcattatgttgaatgaggtccaggaacccagagccacccagcagacaccactgtggcttgccagctgccaagatggagaagcatgtgcccctgtagagcgtctccccagaaccagaccccgagccactcgcttcctctgtgctgtgacaacattggtgccaggggagatggtgtttttcaaagggacctactgtagccactttaatttacaattaagagccttagtttgacttaacacttttgtaggcttttcattgtgtatttttgtgtatgtgtgcatatagcagctactctgtagcagaggtgggtagagacacttaatagtatcatgttgcatgcagatgtcacatcggcctctgcaaaaactgtactgtcttgtttctgcattagacttaagtagtcatgtgaatatactgctatgtcacttttaatattacgagttttatacttggaaaatggtacttgcttcttttaaatctctgtcttctctaacctcccccttcccatttcaatgctcccttcctaatttcagcaataatctcaaaaagcaattaaatagttaaatgaccctaattgt

SEQ ID NO: 18236 - DNA, 2841 bp, Homo sapiens
  CDS (668)..(1372)
ggaacagcggcctctgacaccagcacagcaaacccgccgggatcaaagtgtaccagtcggcagcatggctacgaaatgtgggaattgtggacccggctactccacccctctggaggccatgaaaggtaattgcccatggtctgagagccagcgccctactactgattccacagctgggggtggagggacttcagacctagcccccaccctctggcacacccagcacttcccctacctttccttcccaccctgccgtccctgctgcctgctttctaccgtgcaggacccagggaagagatcgtctacctgccctgcatttaccgaaacacaggcactgaggccccagattatctggccactgtggatgttgaccccaagtctccccagtattgccaggttaggcggggcttgggcgccagctactttgagaccatagctgccctcatccctggccctgggcccccccttcccagctccatccttcttggccctccctggggatgcttgtgcacgctcaacctgggacaaggggagtgctgaaatccagcctgtgccgtgcttccaaaccaaaatgagtccacaggggcgcctcttccaaaagtggacagaggcgtggcctgggggagcaccacctctccccgcatcctaggtcatccaccggctgcccatgcccaacctgaaggacgagctgcatcactcaggatggaacacctgcagcagctgcttcggtgatagcaccaagtcgcgcaccaagctggtgctgcccagtctcatctcctctcgcatctatgtggtggacgtgggctctgagccccgggccccaaagctgcacaaggtcattgagcccaaggacatccatgccaagtgcgaactggcctttctccacaccagccactgcctggccagcggggaagtgatgatcagctccctgggagacgtcaagggcaatggcaaagggggttttgtgctgctggatggggagacgttcgaggtgaaggggacatgggagagacctgggggtgctgcaccgttgggctatgacttctggtaccagcctcgacacaatgtcatgatcagcactgagtgggcagctcccaatgtcttacgagatggcttcaaccccgctgatgtggaggctggactgtacgggagccacttatatgtatgggactggcagcgccatgagattgtgcagaccctgtctctaaaagatgggcttattcccttggagatccgcttcctgcacaacccagacgctgcccaaggctttgtgggctgcgcactcagctccaccatccagcgcttctacaagaacgaggtgacatacgccctctggccctcccctcccagtagtcttgtcagcagctctacctaagcaggcttctgtaacggtgctcccaggcgtctccaggaacgaaaaaaatgaggctgcatgccctgtctctcttctctcagtgctagggcaacttctgcctgaaccctaactggccgtatttattcattcattcaaaaactacttagtgaatgtctgtgctaggcactgtgctatgttctgggaatgcagtggtgaagcagacacaacccctgcctcaaggggcttgcatggagttagatcctgctggcaagaaggccgggcatctattctctccctcccaggtctgggcaacccagatctaacccctagtccccaattctgataggctgacctctctgccagctaacctcaccctccacccctcaatgtagggaggtacatggtcagtggagaaggtgatccaggtgccccccaagaaagtgaagggctggctgctgcccgaaatgccaggcctgatcaccgacatcctgctctccctggacgaccgcttcctctacttcagcaactggctgcatggggacctgaggcagtatgacatctctgacccacagagaccccgcctcacaggacaggtggagaccctggcaggaggagcagaagggaaggaaggaaagagaagagaagctggggatggggtggatgatctgaagcagctgcaggatgttgagggaggtgcaggaaaagcagacatgtgtgctgtgggacagcacaggcccaggactgtccaggccagggatgggcatgcagagcatgtctgaaaggagagaggggttccagccaggcaagctgctcttcctgcaatgtttgcgcctcccactatggtcctccttatactctgcacctccccatctagctcttcctcggaggcagcattgttaagggaggccctgtgcaagtgctggaggacgaggaactaaagtcccagccagagcccctagtggtcaagggaaaacgggtggctggaggccctcagatgatccagctcagcctggatgggaagcgcctctacatcaccacgtcgctgtacagtgcctgggacaagcagttttaccctgatctcatcagggaaggctctgtgatgctgcaggttgatgtagacacagtaaaaggagggctgaagttgaaccccaacttcctggtggacttcgggaaggagccccttggcccagcccttgcccatgagctccgctaccctgggggcgattgtagctctgacatctggatttgaactccaccctcatcacccacactccctattttgggccctcacttccttggggacctggcttcattctgctctctcttggcacccgacccttggcagcatgtaccacacagccaagctgagactgtggcaatgtgttgagtcatatacatttactgaccactgttgcttgttgctcactgtgctgcttttccatgagctcttggaggcaccaagaaataaactcgtaaccctgtccttc

SEQ ID NO: 18237 - protein, 235 aa, Homo sapiens
MPNLKDELHHSGWNTCSSCFGDSTKSRTKLVLPSLISSRIYVVDVGSEPRAPKLHKVIEPKDIHAKCELAFLHTSHCLASGEVMISSLGDVKGNGKGGFVLLDGETFEVKGTWERPGGAAPLGYDFWYQPRHNVMISTEWAAPNVLRDGFNPADVEAGLYGSHLYVWDWQRHEIVQTLSLKDGLIPLEIRFLHNPDAAQGFVGCALSSTIQRFYKNEVTYALWPSPPSSLVSSST

SEQ ID NO: 18238 - DNA, 2552 bp, Homo sapiens
  CDS (8)..(2428)
aagagaaatgctcttcatacccagtaggcagacagtccctacatataaaaagcttcctgagaatgtacagcccaggttcctggaagatgaaggcctttacaccggggtaagaccagaggtggcacgcaccaatcagaacatcatggagaacagattgctgatgcaggaccccgaaagaagatggtttggagatgacggcaggatcctagctctgccaaaccccatcaagccatttccttcaaggccgccagtactaacacaggagcagagcattaaggcagagcttgaaacactgtataaaaaggctgtaaaatacgttcacagtagtcagcatgtgatcagatctggagaccctcctggaaatttccaactggacattgatatttcagggttaatcttcactcatcatccctgttttagccgagagcatgttttggcagccaagctggcccagttatatgaccagtaccttgcaagacaccagagaaacaaggcgaaatttcttactgataagctccaagctttaagaaatgctgttcagactggccttgatccagaaaaacctcatcagtctctcgataccatccaaaaaaccatcaatgagtataaatctgaaattcgacaaacaagaaaattccgtgatgctgaacaagaaaaagatagaacattgcttaagactatcataaaagtttggaaagagatgaaatcccttcgagagttccagagatttacaaatactcccttgaaacttgttttgagaaaggaaaaagctgaccagaaagcagatgaagaagcatatgaagcagaaattcaagctgaaataagtgaactgttagaagagcacacggaggagtacgcacagaagatggaagaatacagaacgtcgttacaacagtggaaggcctggaggaaagtgcaaagggccaagaagaagaaaaggaaacaagcagcagaagaacatcccggtgatgagattgcagagccgtatcccgaggaggaccttgtgaagcccagccctccagagcccactgatcgggcagtgatagagcaggaggtgagggagagagcagcccagagcaggaggaggccttgggagcccacgctggtcccggagctaagcctggcaggaagcgtaacacccaatgaccagtgccccagagcggaggtctcgagaagggaggatgtaaagaagcgctcagtgtacttaaaagtgctgttcaacaacaaggaggtgtccaggacagtcagtcggccactaggagcagacttccgagttcactttgggcagattttcaatttgcaaatagtcaactggccggagagtttaacacttcaggtctatgaaactgtcggacacagtagtcccaccttgctagcagaagtgtttctgcctattcctgagactactgttgtcactggaagggctcctactgaagaagtggagtttagcagtaatcagcatgtgacactggaccacgagggagttggaagtggagtgcccttctcatttgaagctgatggcagtaaccagctgactctgatgacctcagggaaagtgtctcatagtgtggcatgggccattggagaaaacgggatacctttaattcctccattgtcacagcagaacatcggatttcggagtgctttgaagaaagcagatgccatctcatctattggcacatcaggactgacagacatgaaaaaattggccaagtgggcagcagagtccaagctcgacccaaatgaccccaacaatgcccctttgatgcagcttatctcggttgctaccagtggtgaatcctatgtccctgatttctttagactggagcagctgcaacaggagtttaactttgtttcagatcaagaattaaatagatccaaacgatttaggcttcttcatcttagaagccaagaggtgccagaattccgaaattataagcaagttccagtctatgaccgagaaattatggaaaaggtattccaggactatgagaaacggttacgagacagaaatgtaatagaaaccaaggaacacatagacacccatagggccatagtagccaagtacctccagcaggttagagaatcagtcatggactggaggccacgccatctgactcggtggaataggtattgtacctctactctgcgtcacttcttgcctctgttagaaaaaagtcaaggagaagatgtagaagatgaccacagagcagaactgctaaaacagctgggagactacaggttctctggatttcctcttcacatgccttattctgaagtgaagcctttaattgacgctgtgtatagtactggagtacataatattgatgttcctaatgttgaatttgctttagctgtatacatacacccataccccaaaaatgttttgtctgtttggatctatgttgcctctcttatacgcaacaggtaatttttttcactgtactttctgtatcatgtaaaaactacacttaggatatgagaaaattttaaattatatgcatcacatcagaagaacatattattggcaaataataaaattatcaactgtt

SEQ ID NO: 18239 - protein, 807 aa, Homo sapiens
MLFIPSRQTVPTYKKLPENVQPRFLEDEGLYTGVRPEVARTNQNIMENRLLMQDPERRWFGDDGRILALPNPIKPFPSRPPVLTQEQSIKAELETLYKKAVKYVHSSQHVIRSGDPPGNFQLDIDISGLIFTHHPCFSREHVLAAKLAQLYDQYLARHQRNKAKFLTDKLQALRNAVQTGLDPEKPHQSLDTIQKTINEYKSEIRQTRKFRDAEQEKDRTLLKTIIKVWKEMKSLREFQRFTNTPLKLVLRKEKADQKADEEAYEAEIQAEISELLEEHTEEYAQKMEEYRTSLQQWKAWRKVQRAKKKKRKQAAEEHPGDEIAEPYPEEDLVKPSPPEPTDRAVIEQEVRERAAQSRRRPWEPTLVPELSLAGSVTPNDQCPRAEVSRREDVKKRSVYLKVLFNNKEVSRTVSRPLGADFRVHFGQIFNLQIVNWPESLTLQVYETVGHSSPTLLAEVFLPIPETTVVTGRAPTEEVEFSSNQHVTLDHEGVGSGVPFSFEADGSNQLTLMTSGKVSHSVAWAIGENGIPLIPPLSQQNIGFRSALKKADAISSIGTSGLTDMKKLAKWAAESKLDPNDPNNAPLMQLISVATSGESYVPDFFRLEQLQQEFNFVSDQELNRSKRFRLLHLRSQEVPEFRNYKQVPVYDREIMEKVFQDYEKRLRDRNVIETKEHIDTHRAIVAKYLQQVRESVMDWRPRHLTRWNRYCTSTLRHFLPLLEKSQGEDVEDDHRAELLKQLGDYRFSGFPLHMPYSEVKPLIDAVYSTGVHNIDVPNVEFALAVYIHPYPKNVLSVWIYVASLIRNR

SEQ ID NO: 18240 - DNA, 1801 bp, Homo sapiens
  CDS (121)..(1800)
ttcaaatagttgtagcaagaatgaaatagacattgatgcttttaggcattatagcttttctgatcaacctaagtgttcacagtacatatctgggctcatgagtgtacatggactcctcggatgcggccgtcctgcagcagaagcctcgagagcctccgggtgggtgccaagccgcctcccttccagcggtggccgagcgacagctggatcaggtgcggcgcgcaccgggactgggacgagcccccgccacgtggaggcaggatggacggctggagtggggaccgcgcccgggcggctgcacccaccggcctccagcctccaggctgcaaggaccacggctgctcctcgggaagccctttcagggatccagcggggtcctctgtgatacgcagtggcaaaggagaccgcccggaaggcccctccttcctcaggccgccggcagtgacagtcaagaagctgcagaagtggatgtacaaagggcgtctgctgtccctgggaatgaagggtcgtgcccgtgggacggctcccaaagtcacaggaacgcaggcagcctccccaaatgtgggcgctttgaaagtgcgtgaaaaccgtgtcctgtcggtgcctccagaccaaagaattacgctgacagatttatttgaaaatgcctatgggtcttcaatgaagggaagagaacttgaagagctgaaggataatattgaattcagaggtcataagccacttaacagcatcactgtttcaaagaaacgcaattggctatatcagagtactctgaggcctcttaatctggaagaagaaaataagaaatgccaagatagaagtcatttatccatctcacctgtgtctctacctaaacatcagctatcacagtctttcctcaaatcatctaaagagtactgtacatatgtggtatgtaacgctacaaactcttcattatcgaaaaactgtgctttagattttaatgaggaaaatgatgcagatgatgaaggagaaatatggtacaatcccattcctgaggatgatgaccttggtatatcaagtgccttgagttttggtgaggccgactctgctgttctgaagctccctgctgtcaatttgagcatgttgtctggcagtgacctgatgaaagcagagcggcatactgaagactcactgtgctcttccgaacatgcaggtgatattcagaccacacggtcaaatggaatgaatcctatacatcctgcccattccacagaatttgtgcagcagtacaagcaaaagctaggacacaagacacaagaaggtataatggtggaggacagtcccatgttgaaatctccttttgcaggttctgggatcctggctgctacaaatagtactgaattgggaattatggaaccatcttctccaaatcctagccctgtgaaaaaaggcagttcaattaattggtcattgccagataaaataaaatctccacgaactgtgaggaaactttccatgaaaatgaaaaagttgccagaatttagccgaaagctaagcgttaagggaacattgaattatataaacagtccagataatactccttctttgtctaaatataactgccgagaaattcatcatactgatattctgccctctgggaacacaaccaccgctgctaagaggaatgttataagccgataccatcttgataccagtgtatcctcccagcagagctaccagaagaaaaactctatgagttctaagtattcctgcaaaggtggttaccttagtgatggagactcacctgaacttacaactaaagctagcaaacatggatctg

SEQ ID NO: 18241 - protein, 560 aa, Homo sapiens
MRPSCSRSLESLRVGAKPPPFQRWPSDSWIRCGAHRDWDEPPPRGGRMDGWSGDRARAAAPTGLQPPGCKDHGCSSGSPFRDPAGSSVIRSGKGDRPEGPSFLRPPAVTVKKLQKWMYKGRLLSLGMKGRARGTAPKVTGTQAASPNVGALKVRENRVLSVPPDQRITLTDLFENAYGSSMKGRELEELKDNIEFRGHKPLNSITVSKKRNWLYQSTLRPLNLEEENKKCQDRSHLSISPVSLPKHQLSQSFLKSSKEYCTYVVCNATNSSLSKNCALDFNEENDADDEGEIWYNPIPEDDDLGISSALSFGEADSAVLKLPAVNLSMLSGSDLMKAERHTEDSLCSSEHAGDIQTTRSNGMNPIHPAHSTEFVQQYKQKLGHKTQEGIMVEDSPMLKSPFAGSGILAATNSTELGIMEPSSPNPSPVKKGSSINWSLPDKIKSPRTVRKLSMKMKKLPEFSRKLSVKGTLNYINSPDNTPSLSKYNCREIHHTDILPSGNTTTAAKRNVISRYHLDTSVSSQQSYQKKNSMSSKYSCKGGYLSDGDSPELTTKASKHGS

SEQ ID NO: 18242 - DNA, 2902 bp, Homo sapiens
tggaaatgaatataaaatcagaatccaacacataaaaagaaagttcagcaaatgcaggactccagtctccactgcttcacagtagggtttgtccttgtgttttcttgttttgtttgggaaaataatgcaaaagagatttgttgtaaaagctttgaaatttaattatgatcagggagttctaaaggaaattaaacatagcatgagtacttttaaaaaatatgaatttaatatagcatcttatcaaataattcatcccacacggctagctcacttcccaccaggaaatagaaaagaatttttgaggactcttaactaataataatttctgaatttctctgacaccttcactgtttctaaacattttttttggtcatgttaacttacttgattcttcagagtttgcttattatagccatcactttctaatagtacatagtttgaaaagcacttggccgtcttctgcattctgggaacatgtggcttcctgacccacagaggatggcttctcgctgtgtcctcatgtggtggaaggggtgaggggtctctctgaagtgtctctgctaagggcgctagtcccattcttgtgggctttattctcaccacctaatcactcccaaagtccacctcctaacaccatcgcttcaggggaaaaatttcaaagtatgaatttggggagggggcggcattaaatagtcgatgccactccccatgctttcttttcctctgttgtggttttcagatgaacagagacttctggagttgatttgctgtcttatttgttctccctgcttgttctcgctcatctgggcaggtggtttgtcccttcttccccttatccaaatgataaattcctctccctcctctcctttcctcttccagtatcttccttcagctcctcctcttaggagctcaggaaatctgtctgcacctatcatactgacagcatgagcccaaatgtttttccgtagttcatcctggatcccggaaacatgggtggctgcctgcctgccagcctcagtttatttcccagccttactggtttgtaagctttaattttagaaaagaggacagagccatgcagtccacagaccactgcatggtgcttcgtcaccaccggccggtgctcccatgggctgcccaggtgcccaggcgtcctgggtccccaccctcgcatggctgtggagccgggacagctatgacatttgtgtggggttcttaaaaatgtgagaagctcctaatatgttgttgttaaactcatcctctctgatagaatttaattttaaacacaattcccccgaatacaccctaatgtgcttgtttcatttctggagactgtatgcatcactttccttgtctggccaaggccacaacagcgtttgcgttagccactgtgtccctgagtagatggggccctgtttactcttggcctgctccgtgggatcccagcccggccctactggacctcccagctcttttacaagtaacgccttctttcccaggtagccccattttctcctccttcatgacacgcctgtgggtccctgctttcctgggactgtcatcgatgtgcacgctggtgcctatgcacatgctccccctgcatcctcctcggtggggctgacacgcagggacttgcccacatcttctcatcttgatagaaaggatccctgtggcaagccctcttcctttcttcacaaagctgcgttcctcctttcccctctcctttggatatctgccctgaagaagctgatagaagcagatactgcttctggtaggccccgctctgcctgctccgatctttcacttctgcccactccatgctatggccttctctgtctcttcccttgttaactccctcgtctgcatccaattcctgatgcctctgacccctgacactgtgtgctgcccgcagccagaggaaaccacgttctggagtttggcagacctgaaatgcccacaactctggccttacttatgggaggcccttttcttcctcttccaagctctgagcagctccgaccacaccatcctcacactgccacctcccctctgtcctcgaggcccacagtcctgcaggtgcctctgagagtccggcacggtggggagtccacagggctactgtcacacccatactaacctagggagcctgtctctgaaacactgccacatacttgttttctcccatgttccatgtttccgatttaaatgagagacatgaccatttctatctggctctatgtccatgtcttccttgagacagtgcagtggtggattagaaattgtcttatgtcagctgggcacagtggctcacacctgtaatcccagcactttgggaggctgaggcgggtggatcgcgaggtcaggagatcgagaccatcctggctagcatggtgaggccccgtctctactaaaaatacaaaaaaaatagctgggcgcggtggcgggcgcctgtggtcccagctacttgggaggctgaagcaggagcatggcgtgaacctgggaggcagagcttgcagtgagctgagatcgcaccactgtactccagcctgggtgactgagcgagactccatctcaaacaaaaaaagaaagaaattgccttatgtcaaaaattagcaattttatgctgggcatggtggctcacgcctgtaatcccagcactttgggaggctgaggtaggtggatcatgaggtcaggagatcgagaccatcctggctaacatggtgaaaccctgtctttactaaaaatgcaaaaaattagttgggcatggtggcgggcgcctgtggtcccggctgctcgggaggctgaggcaggagaatggcgtggacccgggaggcagagcttgcagtgagctgagatcacgccactgcactccaacctgggtgacagagcgagactccatctc

SEQ ID NO: 18243 - DNA, 1910 bp, Homo sapiens
  CDS (42)..(677)
gcttacagttcctaaccccgaccctgcgcgcagcccgcactatggcagccccgccgcagctaagggctctgctcgtagtcgtcaacgcactgctgcgcaagcgccgctaccacgctgcgttggccgtgcttaagggcttccggaacggggctgtctatggagccaaaatccgggcccctcacgcgctggtcatgacctttctcttccggaatggcagcctccaggagaagctgtgggccatactgcaggccacatatatccactcctggaacctggcacggtttgtgttcacctacaagggtctccgtgccctgcagtcctacatacaaggcaagacctacccagcacacgcattcctggcggccttcctcgggggtatcctggtgtttggagaaaacaataacatcaacagccagatcaacatgtacctgttgtcacgcgtcctgtttgccctgagccgcctggctgtagagaagggctacatccctgaacccaggtgggacccgttcccgctgctcactgcggtggtgtgggggctggtgctgtggctctttgagtatcaccgatccaccctgcagccctcgctgcagtcctccatgacctacctctatgaggacagcaatgtatggcacgacatctcagacttcctcatctataacaagagccgtccctccaattaatgcagccctgaggtgtctggctgtggctcaagatttggtcccatgcagaccctcccaaaggatactgccttctcaagatcataggcctcagactccaactggtgttatcccagggttccgtttgctgaagtaaaaacactgattttaaaatcccagtgggtacctttgtatggtggcacaagtggccgaatcaggctgaggaatctacggcttggttccagctgtgcagctgacttctgtgagactggggccagccacactactctctaggcctcaggggtcaaggagctcagaggagggccctgaggtctctttccggtgggtatgttcattcttcaactgttctgatgtcacagagggctccttgctggtgggcagtgggttgtaaatactttttaaaaaacactaagttccttatctcagatgctgttctactggagaagttctagattcccactgtccaatagaaacacgtgagccatatatgtaattaaaatgtttctagtagctgcattacaaaaaagaagcctgggcactgtggctcactcctgtaatctcagaactttgggaggctgaggcaggtggatcacttgagctcaggagcttgagaccagcctgggcaacatggtgaaacccagtttctacaaaaaatacaaaaaattagccgggttccatcacctgtggttccagctgaggtgggaggatcacttgagcctgtgaggtcgaggctacagtgagcaaagatcacgccactgcactccagcctgggcgacagtgagaccctgtctcaccaaagaaaaaaaaaaaggtgagattaatcttcactatatattttaacacaaatttctaaaagttatttcaacatataattaacatcattagatattttgtactcttttttgtattaagtattcaaaattgggtgtatgttttgccacccacattttcaggacccagtagccacatgtggctagtggctgctgtgacgggcaacacagataacctgagatcaggagttcttgaccagcctggccaacatggtaaaaccccatctctactaaaaatacaaaaattagccaggcatggtggcacgtccctgtaatcccagctactggggaggctgaggcaggagaatcgcttgaacctgggaggcagaggctgcagtgagctgggatcgcacgactgcactccagcctgggccacagagcgagactgtgtctaaaaaaaaat

SEQ ID NO: 18244 - protein, 212 aa, Homo sapiens [sequence omitted]

SEQ ID NO: 18245 - DNA, 2145 bp, Homo sapiens
  CDS (104)..(1855)
gcgactgcgcgcgcagggcctgagcgggcgccggagggaaggggaagcggcggggtagtaacagattatgggcaacagtccttttaattaatctaccgtcatcatggctaatgaggactgtcccaaggctgctgatagtcctttttcatcagataaacatgcccaactcatcttggcccaaatcaataagatgagaaatggacagcatttctgtgatgtgcagctgcaagttggacaggaaagttttaaagctcatcggctggttttggctgccagcagtccttactttgcagctttgttcactggaggaatgaaagagtcctcaaaagatgttgtaccgattctaggaattgaagcaggaatctttcagatacttctagatttcatttacacaggtatagtgaacataggtgtgaataatgtccaggagttgattattgcagcagacatgctacagttgactgaagttgttcatctttgctgtgaatttctgaaaggacaaattgatccactgaactgcattggaatttttcagttctctgagcaaattgcctgccatgatctcttggaattctcagaaaactacattcatgtccatttcttggaggttcatagtggagaagagttcctggcacttacgaaagatcagctgatcaaaattttgcgaagtgaagagcttagcattgaggatgaataccaggtcttcttagctgcaatgcaatggattctgaaagatttgggaaaaagaagaaaacatgtggtggaagtgctagacccaattcgattccctttattacctcctcagagacttttaaagtatatagaaggagtatccgattttaatcttcgtgttgcattgcaaacacttctgaaagagtactgtgaagtatgcaaatctcccaaagagaacaagttttgtagttttctgcagacatctaaggttcgacctcggaagaaagcaagaaagtacctgtatgcagtaggtggatatactcggttgcaggggggtcgctggagtgatagcagagccctcagctgtgtagaacgttttgacacctttagccagtactggaccactgtgtcttcacttcatcaggctcgaagtgggctgggagtaacagttctgggagggatggtctacgctattggaggtgaaaaggattcaatgatttttgattgtactgaatgctatgatccagttactaaacagtggacaactgtagcttcgatgaatcatccccgctgcggcttaggagtgtgtgtgtgttatggggctatctatgctttgggtggatgggttggagctgagatagggaacaccattgaacgatttgatcctgatgaaaataaatgggaagtagttggtaacatggctgtgtcacgctactactttgggtgctgtgaaatgcaaggtttaatttatgtaattgggggcatcagcaatgaaggaatagaacttcgttcttttgaagtctatgatccactttctaagcgttggtctccacttcctccaatgggaaccaggagagcatatcttggtgtggctgcactcaatgactgcatctattctgttggaggatggaatgagacccaagatgctcttcatactgtagaaaaatattcctttgaagaggaaaagtgggttgaagttgcctcaatgaaagtgcctagagcaggcatgtgtgttgtggcagtcaatggtcttctgtatgtttctggaggtcgatcttccagccatgattttttggctccaggtaccttggactcagttgaagtttataaccctcattcagatacatggacagaaattggtaacatgatcaccagtcgttgtgaagggggcgttgctgtgctatgaaatataaagcataacagagcacaaggaacattttgaaaatgcaggacctgaccttttgcaaagcaaacatagatttggtgataagaccctctgattctgtgagttttccatgtatttggtagataaatgactaacgaggctgggcgcagtggcctcatgcctataatcccagcactttggaaggctgaggcagaaggatcacttgagcccaggaatttgaggttgtagtaagctacgatcatgccactgcactccactctgggcaacagaatgagatcctgtctctt

SEQ ID NO: 18246 - protein, 584 aa, Homo sapiens
MANEDCPKAADSPFSSDKHAQLILAQINKMRNGQHFCDVQLQVGQESFKAHRLVLAASSPYFAALFTGGMKESSKDVVPILGIEAGIFQILLDFIYTGIVNIGVNNVQELIIAADMLQLTEVVHLCCEFLKGQIDPLNCIGIFQFSEQIACHDLLEFSENYIHVHFLEVHSGEEFLALTKDQLIKILRSEELSIEDEYQVFLAAMQWILKDLGKRRKHVVEVLDPIRFPLLPPQRLLKYIEGVSDFNLRVALQTLLKEYCEVCKSPKENKFCSFLQTSKVRPRKKARKYLYAVGGYTRLQGGRWSDSRALSCVERFDTFSQYWTTVSSLHQARSGLGVTVLGGMVYAIGGEKDSMIFDCTECYDPVTKQWTTVASMNHPRCGLGVCVCYGAIYALGGWVGAEIGNTIERFDPDENKWEVVGNMAVSRYYFGCCEMQGLIYVIGGISNEGIELRSFEVYDPLSKRWSPLPPMGTRRAYLGVAALNDCIYSVGGWNETQDALHTVEKYSFEEEKWVEVASMKVPRAGMCVVAVNGLLYVSGGRSSSHDFLAPGTLDSVEVYNPHSDTWTEIGNMITSRCEGGVAVL

SEQ ID NO: 18247 - DNA, 2214 bp, Homo sapiens
  CDS (81)..(734)
tcctgcagggggcaccagagatcttggacaggcaaactgcagcccttctgcatggaaccatcatcctggactgtgtcaacatggaccttaaaattggaaaggcaaccccaaaggacagcaaatatgtggagaaactagaggcccttttcccagacctacccaagagaaatgatatatttgattccctacaaaaggcaaagtttgatgtatcaggactgaccactgagcagatgctgagaaaagaccagaagactatctatagacaaggcgtcaaggtggccattagtgcaatatatatggatttggagatctgtgaagtcctggaacgctcccactctccacccctgaagctgacccctgcctcaagtacccaccctaacctccatgcctatcttcaaggcaacacccaggtctctcgaaagaaacttctgcccctgctccaggaagccctgtcagcatattttgactccatgaagatcccttcaggacagcctgagacagcagatgtgtccagggagcaagtggacaaggaattggacagggcaagtaactccctgatttctggcctgagtcaagatgaggaggaccctccgctgcccccgacgcccatgaacagcttggtggatgagtgccctctagatcaggggctgcctaaactctctgctgaggccgtcttcgagaagtgcagtcagatctcactgtcacagtctaccacagcctccctgtccaagaagtgactgttgagaggcgaggaggtagtgggtgaggctacctgactcacttcaaatgcatgttttgagatgtttggagattcagcaattctgtcttcattgctccaggatctggtatactgttctcataaaactgagaggagaaaaaaagtgaaagaaagcagctgctttaagaatggttttccaccttttccccctaatctctaccaatcagacacattttattatttaaatctgcacctctctctattttatttgccaggggcacgatgtgacatatctgcagtcccagcacagtgggacaaaaagaatttagaccccaaaagtgtcctcggcatggatcttgaacagaaccagtatctgtcatggaactgaacattcatcgatggtctccatgtattcatttattcacttgttcattcaagtatttattgaatacctgcctcaagctagagagaaaagagagtgcgctttggaaatttattccagttttcagcctacagcagattatcagctcggtgacttttctttctgccaccatttaggtgatggtgtttgattcagagatggctgaatttctattcttagcttattgtgactgtttcagatctagtttgggaacagattagaggccattgtcttctgtcctgatcaggtggcctggctgtttctttggatccctctgtcccagagccacccagaaccctgactcttgagaatcaagaaaacacccagaaaggccttaatgacctcataggcactcttccaaaaagacaacagaactggaatgagaggcctgggtctgtctcctgccttagcaggcctatcaatttcttgtcaatctctttttttccttgctcacattaaaaggaagcatggagttctaatgctcccataaactatgtattttggcaagacacttcactactccaggcctcactttccccatctgtaaaacagggtttggactaggtgttccctggtattctgtgatctgcctcttgctgccattctttctctcctctgcttctctgtatttttcttctgttatccctgggggtgctcaggttcacttgattgtctgtatttctgtgtggttgtagcaaggactcagcctcatgtagcacgaataggggtgtggttcatggcgtgttgacccagcagagcactccctcccactaacttgttctgcatgtgtagagtctccccattttttttaacgcaacccttttccctttttcctaccccacagctctgttccatgtaagttgccaacagtttcactgaacagtggggtatgtgatggttttggcatgacatcttcagtatgagggggacagtttgacttcactttgagggtgtgatgtctgtagctatgtggaaggtaaaaatagtggtgtgatcatgaaccaaaggaatttatgttttgtaacttgggtactttattttgcattttgttatactattaaataattttttcctg

SEQ ID NO: 18248 - protein, 218 aa, Homo sapiens
MDLKIGKATPKDSKYVEKLEALFPDLPKRNDIFDSLQKAKFDVSGLTTEQMLRKDQKTIYRQGVKVAISAIYMDLEICEVLERSHSPPLKLTPASSTHPNLHAYLQGNTQVSRKKLLPLLQEALSAYFDSMKIPSGQPETADVSREQVDKELDRASNSLISGLSQDEEDPPLPPTPMNSLVDECPLDQGLPKLSAEAVFEKCSQISLSQSTTASLSKK

SEQ ID NO: 18249 - DNA, 2254 bp, Homo sapiens
  CDS (205)..(1626)
tctaggcctggtcggctggcggcgatggcaggattttcataatatatgtagtatgagttccacatcttggcctcttacccagcttcagcagtctcagctccaccagttagagaataaatgggatttgcatgaactccactctgagctgaaatacagactgcggtgttaatatccttttcttctgattgttattaacaggtccttatgtcgtcagaagatcgagaagctcaggaggatgaattgctggccctggcaagtatttacgatggagatgaatttagaaaagcagagtctgtccaaggtggagaaaccaggatctatttggatttgccacagaatttcaagatatttgtgagcggcaattcaaatgagtgtctccagaatagtggctttgaatacaccatttgctttctgcctccacttgtgctgaactttgaactgccaccagattatccatcctcttccccaccttcattcacacttagtggcaaatggctgtcaccaactcagctatctgctctatgcaagcacttagacaacctatgggaagaacaccgtggcagcgtggtcctgtttgcctggatgcaatttcttaaggaagagaccctagcatacttgaatattgtctctccttttgagctcaagattggttctcagaaaaaagtgcagagaaggacagctcaagcttctcccaacacagagctagattttggaggagctgctggatctgatgtagaccaagaggaaattgtggatgagagagcagtgcaggatgtggaatcactgtcaaatctgatccaggaaatcttggactttgatcaagctcagcagataaaatgctttaatagtaaattgttcctgtgcagtatctgtttctgtgagaagctgggtagtgaatgcatgtacttcttggagtgcaggcatgtgtactgcaaagcctgtctgaaggactactttgaaatccagatcagagatggccaggttcaatgcctcaactgcccagaaccaaagtgcccttcggtggccactcctggtcaggtcaaagagttagtggaagcagagttatttgcccgttatgaccgccttctcctccagtcctccttggacctgatggcagatgtggtgtactgcccccggccgtgctgccagctgcctgtgatgcaggaacctggctgcaccatgggtatctgctccagctgcaattttgccttctgtactttgtgcaggttgacctaccatggggtctccccatgtaaggtgactgcagagaaattaatggacttacgaaatgaatacctgcaagcggatgaggctaataaaagacttttggatcaaaggtatggtaagagagtgattcagaaggcactggaagagatggaaagtaaggagtggctagagaagaactcaaagagctgcccatgttgtggaactcccatagagaaattagacggatgtaacaagatgacatgtactggctgtatgcaatatttctgttggatttgcatgggttctctctctagagcaaacccttacaaacatttcaatgaccctggttcaccatgttttaaccggctgttttatgctgtggatgttgacgacgatatttgggaagatgaggtagaagactagttaactactgctcaagatatggaagtggattgtttttccctaatcttccgtcaagtacacaaagtaactttgcgggatatttagggtactattcattcactcttcctgcgtagaagatatggaagaacgaggtttatattttcatgtggtactactgaagaaggtgcattgatacatttttaaatgtaagttgagaaaaatttataagccaaaggttcagaaaattaaactacagaatattaaatattataatgtgcccaaagctctgaatagttaaaaattaaatatttattttcttccccaagctttaggtaaggagaagaggggtcaagagttaaacttagagaccctttgtctctgagaagcatccttctaagacattctgttggagttccctcagtactattccttacaactggagtgggtagaagccttatgaaaattatactgacaacctgatctcgtttactccatgttaatcacattcctaccaacctaaatttctgccaagtcagttctctttggaggaagcccattactccataactgactggatggtccagtgtcattttgatctgcttttcagaatggaaatttataatataaatatatgttttaataccac

SEQ ID NO: 18250 - protein, 474 aa, Homo sapiens
MSSEDREAQEDELLALASIYDGDEFRKAESVQGGETRIYLDLPQNFKIFVSGNSNECLQNSGFEYTICFLPPLVLNFELPPDYPSSSPPSFTLSGKWLSPTQLSALCKHLDNLWEEHRGSVVLFAWMQFLKEETLAYLNIVSPFELKIGSQKKVQRRTAQASPNTELDFGGAAGSDVDQEEIVDERAVQDVESLSNLIQEILDFDQAQQIKCFNSKLFLCSICFCEKLGSECMYFLECRHVYCKACLKDYFEIQIRDGQVQCLNCPEPKCPSVATPGQVKELVEAELFARYDRLLLQSSLDLMADVVYCPRPCCQLPVMQEPGCTMGICSSCNFAFCTLCRLTYHGVSPCKVTAEKLMDLRNEYLQADEANKRLLDQRYGKRVIQKALEEMESKEWLEKNSKSCPCCGTPIEKLDGCNKMTCTGCMQYFCWICMGSLSRANPYKHFNDPGSPCFNRLFYAVDVDDDIWEDEVED

SEQ ID NO: 18251 - DNA, 2284 bp, Homo sapiens
  CDS (134)..(1597)
accctggcttttcttcacctcttcaaccaggagccgagatttctgttgctctgaagccatccaggggtctttaaccagaagagagaggagagcctcaggagttaggaccagaagaagccagggaagcagtgcaatggcttcaaaaatcttgcttaacgtacaagaggaggtgacctgtcccatctgcctggagctgttgacagaacccttgagtctagactgtggccacagcctctgccgagcctgcatcactgtgagcaacaaggaggcagtgaccagcatgggaggaaaaagcagctgtcctgtgtgtggtatcagttactcatttgaacatctacaggctaatcagcatctggccaacatagtggagagactcaaggaggtcaagttgagcccagacaatgggaagaagagagatctctgtgatcatcatggagagaaactcctactcttctgtaaggaggataggaaagtcatttgctggctttgtgagcggtctcaggagcaccgtggtcaccacacagtcctcacggaggaagtattcaaggaatgtcaggagaaactccaggcagtcctcaagaggctgaagaaggaagaggaggaagctgagaagctggaagctgacatcagagaagagaaaacttcctggaagtatcaggtacaaactgagagacaaaggatacaaacagaatttgatcagcttagaagcatcctaaataatgaggagcagagagagctgcaaagattggaagaagaagaaaagaagacgctggataagtttgcagaggctgaggatgagctagttcagcagaagcagttggtgagagagctcatctcagatgtggagtgtcggagtcagtggtcaacaatggagctgctgcaggacatgagtggaatcatgaaatggagtgagatctggaggctgaaaaagccaaaaatggtttccaagaaactgaagactgtattccatgctccagatctgagtaggatgctgcaaatgtttagagaactgacagctgtccggtgctactgggtggatgtcacactgaattcagtcaacctaaatttgaatcttgtcctttcagaagatcagagacaagtgatatctgtgccaatttggccttttcagtgttataattatggtgtcttgggatcccaatatttctcctctgggaaacattactgggaagtggacgtgtccaagaaaactgcctggatcctgggggtatactgtagaacatattcccgccatatgaagtatgttgttagaagatgtgcaaatcgtcaaaatctttacaccaaatacagacctctatttggctactgggttatagggttacagaataaatgtaagtatggtgtctttgaagagtctttgtcctctgatcccgaggttttgactctctccatggctgtgcctccctgccgtgttggggttttcctcgactatgaagcaggcattgtctcatttttcaatgtcacaagccatggatccctcatttacaagttctctaaatgttgcttttctcagcctgtttatccatatttcaatccttggaactgtccagctcccatgactctatgcccaccaagctcttgaattttctcatttcttcacctacaaccctttgtctcgacttatctcctgcaactgactcatctgcaacattcacaccattgcttccttgtggtttcccttctttagaacttttactcatccttgagatgtatggtgtatttggcttgagttatgagagatgcttatttattcatttactctttttcatattttcagagaaagttacctaatccctcctaaagacacggcagtatgggtataacatccttgccttcccatttatccatgtttcactttatcactgatgtgaagaggcccaaagcctgttagccaccatccatgctacctaggtagtccataggaaccacccccatgaccaccaccaacatcaactaaaggttcttggagggtatgtcagtgtgttgctcaggataccccaggtacatcaaggaatcaaggagaggaaaatatgagcaatatgtgtattcagagtgaagattttatgtccagagtatttgagctcaaaccttgcctgttgttttctaatcatgatgaatactttctcagtttctttttcctgaaatataaattgggatttaagactgtacctaactattaagatcactgtgtaaaactaagtgtctctaaatgtaatgcatcgatttagtgtctggaacataataaatatttgctctcataattgct

SEQ ID NO: 18252 - protein, 488 aa, Homo sapiens
MASKILLNVQEEVTCPICLELLTEPLSLDCGHSLCRACITVSNKEAVTSMGGKSSCPVCGISYSFEHLQANQHLANIVERLKEVKLSPDNGKKRDLCDHHGEKLLLFCKEDRKVICWLCERSQEHRGHHTVLTEEVFKECQEKLQAVLKRLKKEEEEAEKLEADIREEKTSWKYQVQTERQRIQTEFDQLRSILNNEEQRELQRLEEEEKKTLDKFAEAEDELVQQKQLVRELISDVECRSQWSTMELLQDMSGIMKWSEIWRLKKPKMVSKKLKTVFHAPDLSRMLQMFRELTAVRCYWVDVTLNSVNLNLNLVLSEDQRQVISVPIWPFQCYNYGVLGSQYFSSGKHYWEVDVSKKTAWILGVYCRTYSRHMKYVVRRCANRQNLYTKYRPLFGYWVIGLQNKCKYGVFEESLSSDPEVLTLSMAVPPCRVGVFLDYEAGIVSFFNVTSHGSLIYKFSKCCFSQPVYPYFNPWNCPAPMTLCPPSS

SEQ ID NO: 18253 - DNA, 2752 bp, Homo sapiens
agctttaggttcacagcaaaatagaacataaattacagagggttcccccgcacccctgggctcagcatccccacaagagcggccatttgttatagtcgcgaccgccctggagacagtgtcatcatcacccacaggccgcacgacctcagggtccaccgggtgctgtgcagtctatggttggatgaacgtatcctgatgtggacccaccgttgtggtatcatacagagtagtttcactgccccaggtcccccgtgttcctgctgcacatccctccgtccctccctctccccagcccctggcattcgctgatctttgtgctgtctgcacggttttgccctttcctggatgtcagagtcggaaccgtacagcgtgtagtccttggagacgggctgctttcactcagcagcatgcgtctatggtccttttttgtcttttcagggcctggtaatattctgttgtctggatggacgccgggtgtttaatccactcacctatgagtgtcttgggtcacttgtagttgtctctctgggcttctcttacggataaatgaagaataaacaaagccagccactggcccctgaactcggttctgcctctgacttgtcttgatgaggaggtgtccttgcgtggactcgtgctgtgtcatcatgctcctgctccgtgttcggagccacctgggctgtgacaggaggtcagtgttcagggatgatgcagtttctgttgaggcaacactgaaaatgccttgcttggaaactgcgtctcacagagcatggagcttgttaacaattttaaaaaactgatgatgctgatgggagagagggatgatgggagtctgtctggggtctttgaggccttgtccagagactgccccaggatcctgggtggctgtgcacagccagctgagccatgtgcctgccactgcatctgtactcctgggccagaaagcacctttgcttagcccacctgatttttctgtcagagaccagacgagtaatttctaacctgggcttgagacactaacagtgtattgggatttttttttttggacacacaatctctctctgtcactgaggctggagtgcagtggcacagtcatatagctcactgcagcctcaacctcccgggctcgaaccttcctcctgcctcagccccctgagtatctgaaaccacaggcaggtgccaacacacccagctatttttgtttttttattgttttgttaaaaaaaaattttttttaagagatggggtctccctgtgttgcccaggctggtctcacactcctgggctcaagcagtcctcatgtcagccttccagagtgctgaggttacaggtaatcttcagctgtttcacagtgtccctcttgtcagcctcccagagtgctgagatcacaggtaatcttcatctgtttcacagcgtccctcatgtcagcctcctagagtgctgaggtcacaggtagtcttcagctgtttcacagtgtccctcatgtcagcctcccagagtgctgaggtcacaggtaatcttcacctgtttcacagtgtccctcatgtcagcctcccagagtgctgaggtcacaggtaatcttcagctgtttcacagtgtccctcatgtcagcctcccagagtgctgaggtcacaggtagtcttcagctgtttcacagtgtccctcttgtcagcctcccagagcgctgaggttacaggtaatcttcagctgtttcacagcgtcaccagattctccaaacacaatttaattttattcacatagacagtgctacattgtcactggtgacaggcgctttgtggttgtttttggtgggtgaatattgcaccgattcaacaacaggagatcagtgtctgagggtcctgtgttgccacccgaggcacctgctttgaccagggatggagagtcccatgcccaggacgaaggtttgtgtgctggtggtgagctagctgggagacgtggcacgggccgcttgtccctggccaccgcctgctgccaagggctccactccagtcccttgcctgtcaatcagaagatgctcagaggagaggcttctgcatcatcttcatcttgacattccaagagcagtaccgggtcagcatccacaaaagcacactgtaaaactgggaactgtgtcttacccttcctgagtgaaaagggaaagtttatgcctcagcctgaggcaggtgggccccttgccatgcacacctttgtcctgcagccagggatccacttggctgggctcaacccttccccgtcagggacgactgcacagaaaggagcgcggatagcagcaaggcccgccacggggaaggcctgcttcctgtgggtccccctgtgtggctggcagggagtggtacggcgctgggagtccagaatcactgaggacacggaaagcttcagcttctttgagaaaactcagattttgtaaatgcgcatccagttgacagcacttacggtggaatccgtggagttggacttgtgagaggccttgccctgagggggttcttggctggtgtctgtcctggaggtggatgccttgatggctgtgtctcccgtgctcccctcacccaggtcctcatcctcaggactgtgagacgccgttggacgtggaggagcctgaggagctctggctctgtgggtatgtctgctggcatttgccagttgaaacctgaaggattggaaaatgtctgtataccaattccaattaacaacaggaataataagcccattgcatataagcagcacattcttt

SEQ ID NO: 18254 - DNA, 2081 bp, Homo sapiens
  CDS (119)..(1318)
agtccacgcggattttcgaagctggggctggcaagaggccgctggacaccacgctccagtcgtcagcccacttcctagctgaacagcgcgaggcggcggcagcgagccgggtcccaccatggccgcgaattattccagtaccagtacccggagagaacatgtcaaagttaaaaccagctcccagccaggcttcctggaacggctgagcgagacctcgggtgggatgtttgtggggctcatggccttcctgctctccttctacctaattttcaccaatgagggccgcgcattgaagacggcaacctcattggctgaggggctctcgcttgtggtgtctcccgacagcatccacagtgtggctccggagaatgaaggaaggctggtgcacatcattggcgccttacggacatccaagcttttgtctgatccaaactatggggtccatcttccggctgtgaaactgcggaggcacgtggagatgtaccaatgggtagaaactgaggagtccagggagtacaccgaggatgggcaggtgaagaaggagacgaggtattcctacaacactgaatggaggtcagaaatcatcaacagcaaaaacttcgaccgagagattggccacaaaaaccccagtgccatggcagtggagtcattcatggcaacagccccctttgtccaaattggcaggtttttcctctcgtcaggcctcatcgacaaagtcgacaacttcaagtccctgagcctatccaagctggaggaccctcatgtggacatcattcgccgtggagactttttctaccacagcgaaaatcccaagtatccagaggtgggagacttgcgtgtctccttttcctatgctggactgagcggcgatgaccctgacctgggcccagctcacgtggtcactgtgattgcccggcagcggggtgaccagctagtcccattctccaccaagtctggggataccttactgctcctgcaccacggggacttctcagcagaggaggtgtttcatagagaactaaggagcaactccatgaagacctggggcctgcgggcagctggctggatggccatgttcatgggcctcaaccttatgacacggatcctctacaccttggtggactggtttcctgttttccgagacctggtcaacattggcctgaaagcctttgccttctgtgtggccacctcgctgaccctgctgaccgtggcggctggctggctcttctaccgacccctgtgggccctcctcattgccggcctggcccttgtgcccatccttgttgctcggacacgggtgccagccaaaaagttggagtgaaaagaccctggcacccgcccgacacctgcgtgagccctaggatccaggtcctctctcacctctgacccagctccatgccagagcaggagccccggtcaattttggactctgcactccctctcctcttcaggggccagacttggcagcatgtgcaccaggttggtgttcaccagctcatgtcttccccacatctcttcttgccagtaagcagctttggtgggcagcagcagctcatgaatggcaagctgacagcttctcctgctgtttccttcctctcttggactgagtgggtacggccagccactcagcccattggcagctgacaacgcagacacgctctacggaggcctgctgataaagggctcagccttgccgtgtgctgcttctcatcactgcacacaagtgccatgctttgccaccaccaccaagcacatctgtgatcctgaagggcggccgttagtcattactgctgagtcctgggtcaccagcagacacactgggcatggacccctcaaagcaggcacacccaaaacacaagtctgtggctagaacctgatgtggtgtttaaaagagaagaaacactgaagatgtcctgaggagaaaagctggacatatactgggcttcacacttatcttatggcttggcagaatctttgtagtgtgtgggatctctgaaggccctatttaagtttttcttcgttactttgctgcttcatgtgtactttcctaccccaagaggaagttttctgaaataagattt

SEQ ID NO: 18255 - protein, 400 aa, Homo sapiens; identical to SEQ ID NO: 15460

SEQ ID NO: 18256 - DNA, 3088 bp, Homo sapiens
  CDS (148)..(1980)
gctccagacgctgagaggcaggaggcactagggatcgtccgcaggattgggactgatacagaggccgccacggagcccgccggagccaccgttcctgctgctgccgccgctgcccgaatcggaaccgtcgggccgcagccgccggcaatgccgcgaaggaagaggaatgcaggcagcagttcagatggaaccgaagattccgatttttctacagatctcgagcacacagacagttcagaaagtgatggcacatcccgacgatctgctcgagtcacccgctcctcagccaggctaagccagagttctcaagattccagtcctgttcgaaatctgcagtcttttggcactgaggagcctgcttactctaccagaagagtgacccgtagtcagcagcagcctaccccagtgacaccgaaaaaataccctcttcggcagactcgttcatctggttcagaaactgagcaagtggttgatttttcagatagagaaactaaaaatacagctgatcatgatgagtcaccgcctcgaactccaactggaaatgcgccttcttctgagtctgacatagacatctccagccccaatgtatctcacgatgagagcattgccaaggacatgtccctgaaggactcaggcagtgatctctctcatcgccccaagcgccgtcgcttccatgaaagctacaacttcaatatgaagtgtcctacaccaggctgtaactctctaggacaccttacaggaaaacatgagagacatttctccatctcaggatgcccactgtatcataacctctcagctgacgaatgcaaggtgagagcacagagccgggataagcagatagaagaaaggatgctgtctcacaggcaagatgacaacaacaggcatgcaaccaggcaccaggcaccaacggagaggcagcttcgatataaggaaaaagtggctgaactcaggaagaaaagaaattctggactgagcaaagaacagaaagagaaatatatggaacacagacagacctatgggaacacacgggaacctcttttagaaaacctgacaagcgagtatgacttggatcttttccgaagagcacaagcccgggcttcagaggatttggagaagttaaggctgcaaggccaaatcacagagggaagcaacatgattaaaacaattgcttttggccgctatgagcttgatacctggtatcattctccatatcctgaagaatatgcacggctgggacgtctctatatgtgtgaattctgtttaaaatatatgaagagccaaacgatactccgccggcacatggccaaatgtgtgtggaaacacccacctggtgatgagatatatcgcaaaggttcaatctctgtgtttgaagtggatggcaagaaaaacaagatctactgccaaaacctgtgcctgttggccaaactttttctggaccacaagacattatattatgatgtggagcccttcctgttctatgttatgacagaggcggacaacactggctgtcacctgattggatatttttctaaggaaaagaattcattcctcaactacaacgtctcctgtatccttactatgcctcagtacatgagacagggctatggcaagatgcttattgatttcagttatttgctttccaaagtcgaagaaaaagttggctccccagaacgtccactctcagatctggggcttataagctatcgcagttactggaaagaagtacttctccgctacctgcataattttcaaggcaaagagatttctatcaaagaaatcagtcaggagacggctgtgaatcctgtggacattgtcagcactctgcaagcccttcagatgctcaaatactggaagggaaaacacctagttttaaagagacaggacctgattgatgagtggatagccaaagaggccaaaaggtccaactccaataaaaccatggatcccagctgcttaaaatggacccctcccaagggcacttaaagtgacctgtcattccgagccagcgaaccccagcagtaggaatccgtaccctagggatctgtctgtcatttctctgttgctcttgtgattggcaagtacagtatcctttgggaaggccatccccctcaggactgtcctggctccgacctttgtgtacactgcagacgctggttctgaggaactgttgtttcggcctcagtgaggttgcctggatgggatctgtattagacttgagtgcaggtctctcagcactgacccaaggagttctgttatggtactgtacctgtccagtcactggttctctcctcatgtcctctcgccccatgaggttgtgttgtgtcttctaagcgtggtactagtgcttgccacctggtcaccagacctccaaatatggctgccaccaccaggacctttccagttactccttatatgtgtgttctatggaggggcagggaaaaggtggcacttgtgagtgtgtgtggattggcagggggtccattcactttgggttccatcttgctttaaatttcttcattttgattaagagacctctttttgatctgtattgggctaaccagagccaaatacttttgaagagtttcccagggactagtcatggtaatagcatataattgatctgaatgagatggagagaagaatgaaggggtggtggttctgggtttgatttgagttcacctgtgggcagtgggcagtgggcagtgtcttggtgaaagggaacggatactactttttgcctcaccgtaaagtactcactagtaaatatttccttctctctttactcccactttttacgtttgcaggtgccaaagtaatgtccacttttccctttcatgctgcatattaactggttaattatactgcagaaaccttttcacctccactagtctgatacagtacatctgtacttccatataccttgcactgattttgtctgagtgccctgggagaagtagaaaatgattgaaagtgacttccgtatctcagcccatgactcagcaaggcagaatggccacccctgccaaagtttgcttctcttttcaacagtgcctcaccctccctctaggattaaagtgcttctgccctt

SEQ ID NO: 18257 - protein, 611 aa, Homo sapiens
MPRRKRNAGSSSDGTEDSDFSTDLEHTDSSESDGTSRRSARVTRSSARLSQSSQDSSPVRNLQSFGTEEPAYSTRRVTRSQQQPTPVTPKKYPLRQTRSSGSETEQVVDFSDRETKNTADHDESPPRTPTGNAPSSESDIDISSPNVSHDESIAKDMSLKDSGSDLSHRPKRRRFHESYNFNMKCPTPGCNSLGHLTGKHERHFSISGCPLYHNLSADECKVRAQSRDKQIEERMLSHRQDDNNRHATRHQAPTERQLRYKEKVAELRKKRNSGLSKEQKEKYMEHRQTYGNTREPLLENLTSEYDLDLFRRAQARASEDLEKLRLQGQITEGSNMIKTIAFGRYELDTWYHSPYPEEYARLGRLYMCEFCLKYMKSQTILRRHMAKCVWKHPPGDEIYRKGSISVFEVDGKKNKIYCQNLCLLAKLFLDHKTLYYDVEPFLFYVMTEADNTGCHLIGYFSKEKNSFLNYNVSCILTMPQYMRQGYGKMLIDFSYLLSKVEEKVGSPERPLSDLGLISYRSYWKEVLLRYLHNFQGKEISIKEISQETAVNPVDIVSTLQALQMLKYWKGKHLVLKRQDLIDEWIAKEAKRSNSNKTMDPSCLKWTPPKGT

SEQ ID NO: 18258 - DNA, 1853 bp, Homo sapiens
gatggagtatcactctgttgcccaggctggagtgtagtgactcgatctcagctcactgcaacctccacctcccaagttcaagtgattctcgtgcctcagcctcctgagtagctggaactacagatgtgcaccaccacacccggctaatttttgtatttttagtagagacggggtttcaccatgttggccaagctggtcttgacctcctgacctcaggtgatctgcccgcctcagcctcccaatgtgctgggattacaggcgtgagccaccgcgcctggcctgtacatataactcttaaaatgctgccctgaccctggggctcactttcaaagatgtccacactctgtaggccaggaccccacctgtcccgtacccttcctggcagccctgtccctgctacatcgcccttcagctacaccagctttctttgggtccctggaccacacctgataccttcccgcccagaagtgttatctctgtcctggcagttgctcaaccttttatggtccctaccaccaaggccatctgcttggttgacatacccaccccaactgtaattaaatcatccccggtgtctcctcactagacagctccacataagcacagctggtccttttagggctgtgtccccagcacctcccacaaaggaggatgcagttcatcaggatgggttggatgaacagcccattttacagatgaataaactgaggcacaggcaggtgcagaattttggcagcactgcacacctgtcctggctttgtcctcctccctggggaatgagcttggagcacccctctaggaactgggatgccagcctcttcccttgaccatcttggtccttgtcatgtgggccccagtaccaggggtggctttaatttggctgcccagggaggtggttcagggctgccaggacccctgaagtaggctctctgggctctgtcctttgccccccaacatggtgcctgtttctcctgcctcttcatgcagagtggccagctcctggcccattcagctctgagtttgagctcctgggcggagatttttgttgccttgtaactgggattcctagatccagcctccaccctctgattgccctaaggaggttttggggttttgttttgttttgtttgtgttttcgtaggatggtggcagtgattttgaggaggggaagaggaaggaagatacaagcaagggaagtcacaggctgtggtgcctaggcagaccctggtttgaatcttggccttaccactttttgcatgtaagtggtaggggcagcagatagctcaggacatatcttgggtttttttgtttgtttttgttttgagacatagtctcgctctgttgcccaggctagagtgcaatggcacaatcttgactcactgcaacctccaccctcccgggttcaagtgattctcctgcctcagcctcccgagtagctgggattacaggcaccggccaccacacccagctaatttttgtatttttaatagggatggagtttcaccgtgtttgccaggctggtctcgaactcccgacctcaggtgatccacctgactcggcctcccaaagtgctgggattggccaggtgtggtggctcatgcctgtaatcctacactttgggaggccaaggcaggtggatcatttgaggtcggtagttcaggaccagcctggcctatgtggtgaaaccgcatctctactacaagtacaaaaattagccggacatggtggcacacgcctgtaggcccagctactcaggaggctgagaatcacttgaccctgggaggcggaggttgcagtgagccgagatggcaccactgcactccagcctgggtaacggagcgagactctgtctt

SEQ ID NO: 18259 - DNA, 1916 bp, Homo sapiens
gaaggatgcatctagtgcaggacccattcatcaagagatgtaagtacattcttcagcttagcttttcaagcatcaagtagtgtttctattctgtatttcagaagatattatggcatagtttaaaggggtgctagcataggacttaggaagactttttttcaaatcattgctttgattttatcttcataattgtaaaaaatcatgttatttttctgttcctgttttctgaaggaaaaaaacatcttcttctaggtttgatataatgtttcagtgagaacagcacacagtgggagtggcccagtgcctggcctttaaacatgcttaataaatgttacatgaatactgtatcctgctttgatcaccactggcattttgtaatggaattagttcttctttttttttttttcttcaacttttattttaagttctggggtacatatgcaggatgtgcaggtttgttacataagtgaacatgtgccgtggtggtttgctgcacaggtcatccatcccatcacctaggtattaagcccagcatccattcgctgttcttcctgatactctccccaatccaccatccccctgcctcctgccacatgccccagtgtgtgttgtttccccccatgtgtccatgtgttctcatcattcagctcccacttattagtgagaacacctggtgtttggttttctgttcatgcattagtttgctgaggataacggcttccagctccatccatgttcctgtaaaggacatgatctcatttgtaatggagttagttctaaatggaccatttatattgttcaacagacactagagaatactattcattttgcatgattctttggtcaaggacatactgtaagctgcgttagtgttctccttggttaatatctgaactgaccatgtcactccaactcttatagaccagaattcatttataaagcagaaagataagccaatatgagagaggttatgaagctgatgtttgatttctggtctcctgcgtggagcgatgggcctattgccaaccagagttggtcgggaaaaaggaaagatgactcctaccagtgtacttacgctttatgatcttgaatattttcagtgtttaaggaatctcttccttctttgatctccactgcatgaagaactctgttgcaggtgttaacaaggaagtttgaaatagaaagccagaacctgccccccaaagatctgacagtagtagaaggagatccattatgaagaaggtataatggcaacaaaagaataatcacaaattacttgtgtgtgtaatatgtgttgtgtggtgtgggtcaaggagatgaggaaggtggttagggaagactttatggaggaagtgagctgtcaacaggaattgaaggtgagaagaaaagttggggggaatccatgttaatgactgtctcagtcatcttaaactaggttatgctgtgatagcaaaaccccagtggttgcaacagcagaggcttattgcttgctgtgctgtgtgtctactgtgggtctgctatagttctgctccttcctgtcttctgtcctatacccaggaagggtggaggaggaaaggcaaacctggcaaaccattcataggctctaagcttatgcttggaaataacaggtgtcacttgtgcccacatttcattggccagtgcagatcacatggccacacctgagtttgcatataaggaggcatccttcttctgtagagactggtaccacaagtcatgtggccaaggctgaggtcatggggcaggcagatgacacatagtcctcttctagggaggggcagtgaatcatctaccaagacagcaatcaagaagggcaataatgatgcattgacaggcagggtttcccacttaaaatgttttaaaactgaaagtctcttgttcaagttggtgtttggatt

SEQ ID NO: 18260 - DNA, 1727 bp, Homo sapiens
tagtagagatggggtttcaccatgttggacaggctggtctccagctcttgacctcgtgatccgcctgtctcggcctcccaaagagttgggattacaggcatgagacatcacgcccagactctttttttttcttaagacataatctcactctgtcgcccaggctggagtgcagtggtgtgatctcacctcaccgcagcctccgcctccctggttccagctattctcgtgcctcagccttgccagtggctgggtctacagcgggggtgccaccacgcctgtttaatttttgtatttttagtggagacggggattcaccatgttggccaggctggtctcgaactcctgctcctgacctcaaacagtcctcacgccttggccttccaaagtgctgagagccaggcgcctggctctatgtctttttttggggggtatggagtcttgttctgttgcctaggctggagtgcagcggtgtgatctgggcttactgaagcatccacctcctggtttcaagcagttctcctgcctcagcctctcaagtagctgggactacaggcatgccccaccacgcccacctaattttgtgtgtttatttttagaagagaaggtttcactgtgttggccaggctgatctccaactcctgatctcaagtgatccgcctgccttggcctcccaaagtgctgggattacaggcataagccactgcgcctgactcctatgtcttttatttctaggtgtgtcccgtatcagtagaacctgactttgacaataacttggaatttgaagaggaggagaattatgtgaagtgaggctgttgtctgactgaaattcctaattgtagggatggtttcatttaagtaattttggagccttacaccaagctccatgctgagggcaggacccctagatgaaccaaatgttgtttcacttactttgttttcatggtttgtttgctttcagtttctatagctttcggtccagcctttttcagatattgaaatgattttcgttttggagaaagaaaggcacggtctctcttttcttgatcctttttctaatctgctgattttactattttgggaataatctcttttgtccttctgtcctctcttaagtctcttaagatgtgaaggtttagccacccatcccatccaaacaagattgggcacagcagcctaaagagatgtgtcatgagaggttttccttttctccacatatatgttagtgaatgactttgtgctcctgtatgttaattgggtcttgtcatgttagcatttagaagttcagacccttcagggattcctaaaccttgggaaaaaataacttgatcatttacattttcgtgaagcagtcttgctctatcattcatactgtgtctccacaagacatttccgtcccttttcataattttagtcaaagccacctagtaacctttaattatataggagagcttgattaagcagtgggtcagatgctctgaaccaccttgattcttagaaggtcatgaaaaaatgttgcctatagttaataattttcttaaaactttattaactatgtaattattttatgagcctctgatgttttagtacgacattccaccagtggaaacatgctcccctttattatgtggcaagaatgataattcgggccaggtgttgtggcatgtgcctgtacttgggaggctggaggatcacttgagcccaggaatttgaggccagcttgggcaatg

SEQ ID NO: 18261 - DNA, 2175 bp, Homo sapiens
  CDS (79)..(1719)
agtgtgatgccaccgccgctacggggaagtaatggtatccggccaattgagattcggagttaaaacagggatgtgcagatggaggtcggaggagacactgctgccccggcccccgggggcgcggaggacttggaggacacgcagttccccagtgaggaagctagagaaggtggaggggttcacgcggtcccgccggatcccgaagacgagggcctggaggaaacaggatccaaggacaaggaccagccacccagcccatcaccaccgcccctgtcagaggccctgtcaagcacctctcggctctggagtcctgcagcccctgagaatagtcccacatgtagccctgagagtagctctggaggccagggcggggaccccagtgatgaggagtggcgcagccagcggaagcatgtgtttgtgctgagtgaggctggcaagcccatctactcgcggtatggtagtgtggaggcgctgtcggctaccatgggtgtaatgaccgccctggtgtcctttgtgcagagtgcgggagatgccatccgtgccatctacgctgaggaccacaagctggtgttcctacaacagggcccactgttgctcgtggccatgtcacggacttctcagtcagcagcccagctgcggggggagctgctagctgtgcacgcacagatcgtgagcacacttacacgtgcaagtgtcgcccgcatcttcgcacacaagcagaactatgacctccgccgcctgctggctggttcagagcgcacactggaccgacttctggacagtatggagcaggacccaggagccctgctcctgggtgccgtgcgctgtgtgccccttgcccgcccgctgcgagacgcactaggtgcgctcctccgacgttgcacagcgcctggcctggcgctgtcagtgctggcagtaggcggtcgacttataacagcagcccaggagcggaatgtgctggccgagtgccggctggacccagctgacctgcagttgctgctcgactgggtgggtgcaccagcctttgcggcgggtgaggcttgggcacctgtgtgcctgccccgcttcaaccctgatggttttttctacgcctacgtggcccgcctggatgctatgcctgtctgcctgctgctgcttggcacccaacgtgaagccttccatgccatggccgcctgccggcgcctggtcgaagatgggatgcatgcccttggtgccatgcgtgcccttggggaggctgccagcttctctaatgcctcatcagccagtgctcctgcctacagcgtgcaggctgtcggggcgccgggcctccggcacttcctgtataagccgctggacatccctgaccaccaccgccaactgccccagtttaccagccctgagctagaggccccctacagcagagaggaggagcggcagcggctgtcggacctgtaccaccgcctgcatgctcgtctccacagcacctcccgacccctgcgcctcatttaccacgtggctgagaaggagacactactggcctgggtgacctccaaattcgagctctatacctgcctcagccctctggtgaccaaggcaggtgcaatcttggtagtgaccaaactcctgcgctgggtgaagaaagaggaggaccggctcttcattcgttacccacccaagtactccacaccaccagccacctctacggaccaagctgcccataatggcttgttcactggactctgatagttggagctcccagaccaggcagtgctgggagcaaccacctttgttttttaccttctgtctaccctggaaatgtgtgtgggggtgtgtctgtggccagtcattgtctccctaagcaatggggcaaggtctgagggcccaccgatgagagagatggtggcagccgccaggcgagcaggctgctttccctgcccagtcatgcacctccccctctggggaaatccttaggcctccctctcccttccctctgtctcatctcctccacttggatgatgctctagcctctgtcagggactgtcccctccaaacttgcttccgtggtctgcctcctagttgaatctcagccctgagtgtccagatctggccaaggtgtctagggtggcccacgggggtgctggaattggcacttcagggccaggctatgcttgggactggcctgagggtattttaaag

SEQ ID NO: 18262 - protein, 547 aa, Homo sapiens [sequence omitted]

SEQ ID NO: 18263 - DNA, 2537 bp, Homo sapiens
ttgccatgtggaaatggggcagagtgttgccaattttctgattttttgtgtggaaaaaaatctccaaattgtagtttttaaatttggggaatgcaaatatatatatatatacacacacacacacacacacatacacatacaatccatatacatatggagtatgtaagttggcaataacagtatacatcaaaaaatttacaaacactgcaagacaaataaaatccaagccatccatttgtgaccacagtcataagcattcacttagccaggggcttttagataattgtctgtgaagtctgagaaaagactaagataaccaagatgaacataatgtcaaaggacgaaatcatggggacaatttggattttgttccaaaagacaagtgtttttaaaaagaacctttccatacttcgtgttctgttctatagagttaaaccttttaacttccatggccctttagatctctttcaagcacattccattttcttctgatcatacttcctcagaaaacctttttttggctgggtgtggtggctcatgcctgtagtcccagcactgtgggaggctgaggtggttgtattgcttgaggccaggtgtttgaggccagccagggcaacacagcaagaccccatctctacaaagtgttaaaacattagctaggcatggtggtgcacgcctgtggtcctagcttcttgggaggctgaggcaggattgcttgagcccaggagtttgagccttcagtgagctatgatcgcgccactgtactccatcctgggtgatggagcgaagaacctgtctcttaaaaaaaaaattttttttttaattaaaaaaacccaccctttttcatttcccaacattttttggctattatgatcgctatgtgttacttcaaataatttccagtgaatccacacttgatgttgcaaggcctaagtttgctgcagaaatacaatttcctacacttcatacctaaaggagattcagagctatcgctcaaaaccaaaagtcttggtttttaaatgtgcttagacaaaaaaaatcaggaaaggtaccctaatcgttcaacagcaatcatctttggaatgggcattttggtaggtaaagtgtggtggacgtccttattattatttttgagacagtgtcttgctctgtctcccaggctggaggtcagtggcacaaatctcagctcactctaacctgcacctcccgggttcgggtgattctcatctcagcctcccaagtagtgtgaactggaggcgtgtgccaccacgcctggctaatttttgtatttttagtagagacagggtttcaccatgttggccaggctggtctcgaactcctggcctcaggtgatccacccacctcggccgcccaaggtgttgggattgcaggcatgagccaccatgcccggccccttattttactttatcctcctgattatttgaatttgttacactaagcatgtattttataatcaaaaataattaagatttaaaacaatgtatttgactactaaaaagcaaattatataaatcagttgaataataatgttgttaaagaggctgtttagcactaatttgaccaaatctatagtcaaagtttgattctacttgaattttttggaaatttgctgttgtattacttattctttgccttgttctctgtgaagtcctttcctaaaaaagaaacttatacaatttagttcacaaaactttgttgacctctttctctgtagaaatgaaaactaaatatatataattgagaaataattctgatactcttcattcctataaaagtaattaagatagacctataggattgttgaactttgctgccaaatatagtaaccagtaaccacagctagctgtaaaattgaaaattcagttcagtcaaactagccatatttcaagtgctcaacagccactggtggctattggttaccttactgaccagccaatataggctatttccgtcattatagaaagctctattggacaacattggtctaggacatatattttgtattttcccctcacccaccatccaataatgagtaatagcacaaagtaaaagtgacttaatttgaaattacttctgtttggctagtttgcttagctgatcaccaccaacatcataggtctataaatcacccaactaagatcaggggtgtttcatgggaaaatctacacaaactattcattaaaaaccatagagccatggactgtcatttctgatttctgtttgattctttgtggtcatcattgaatatacaggggcctctatacactctggggagtatctattctcaggtgagcaaaataccgaatactgaatggaaatcaactgtaagtattaggacttcatatgcaacttgaatttttggtgctgtccggagtctagagccccacaatctgttttggttacagtttatccctgtaggataaatgatccatttaactattcatcagaggtgctgtaattttaaattgtctcttgtctccttcagttaattttcagaattaaaaacataccatggg

SEQ ID NO: 18264 - DNA, 1995 bp, Homo sapiens
aaaaagagtggtaacttgatgaattccagttattctaaggttctttgcctagtaaatgtttatttctctaataaatcagaacttattgcaactaactgctttgtgctttcatataccatccccaccccaagaattttgaaagcttttagcaaatactaatgtatttgcttccccttcataagttaaaaggataaatattgatactttcatattacattatgagggcagctgcagcctgtgtggagcggccactgagaagacgccaactgcagcggggtaggcacagctggggctgcgcgctccacagagccagttggagccaggaacaggcaggagcccagcccttttcagagttggaggggtgggggcctccccctcctgggtgcaactgtgcagccacccagcagtgacctgggtttccctgtgctttcaggggctgggaagtgtccctctccagccctggcccccacaggctcagaagtgcctgcccccactgtctggcctctccctgttcccggtgtccactctgattttagagcaaagttgaggctgagcctaggcactgtcgcgacccagctgcatgcacttacggcagggctgacaggccagccctctgccccctcagcaccccctctggactttgggtgcccgtgagcatgggagggaggctgagggggcactgaggcagctcgatgtgggcctgcaggctctgtggacgacatgatcaatggtggcaggaagcagacaggctcctgggcagaaaggggtaggttcccggtgaagcctcaccttcaagccaagaacggcctgaagcatgggggccaggctgtcaactgtgcatagagtccgtggcttacagtgagaacttatggtgctttttcccgacctactcttggctgcccatggaccaatctgcacacacttcctcccatctgaagcccatgaaaaccccagactcagccagactcacagagaccttggagatgagctgtgggaaagaactacccaattcggttgctgttgtcttgtcaggacaacctgcctgcagaaaggagccacccactgcagatccctcttcattgacagctggatacttctcaggacaacctgcctgcagaaaggagctacccacttcggctcttctgcctcttgatgaagctgttctgtctcctctccgccttggtcaccctcaaattatccatgtacctcattctacctggatgtggacaagaacttaggacctgccaaatggtgggactgaaagagctgcaacacaaacagggctgaaacacccccctcccccgcttaccacattatgggtgatgagaaggagagaagagctgcagcccttcagggatcccagacctaggggctccccaagccagggctgtgacaccctctttggagctctttggttcctggtgtctccaagcttcccagtgccactgtgctccccttatccagatgcaggtgcctatagctgaagccatgtgtggtacatttggtccagccacagccttgcatgaagctggcacttgtgctggtgcctggagctgtctgccttgccacagcagctagcatgcgtggctgtgcacagtggctggaccccatgctcattcgctcatacactctttgccactccgtgcctggctcccccttggcaggtgtgagatcgaggccagtagtgtgagccaagcgcagcctgccaggccaagtgggtggaacgagccctgtgggcgcgagcaatactcaggcagaaggcgctgcctgccacagaggtttctggctggcaaatcgacatcccaagggtcccgtgacaattatagcccctgcttctggatagagtaaagaaaagggaaacaaaaaaaatcgaataacccaacctccagacattgctggtgttaacttattgccaaattctttctgatgtatgtgtatatcatatgagtatttaacagttttatatcttagttctttgctaaatgcactttcagc

SEQ ID NO: 18265 - DNA, 1941 bp, Homo sapiens
gtatttgtgttagatgttgttagatgtgttgtttttttgtgtgtgttttgtttcgttttctgagacagggtcttgctctgtcacccaggctggagtagtggcgcgatctcggctcactgtaacctccacctcccaggttcgagcaattctcctgcatcagtctcctgagtagctggcgttataggcacctgccaccacgccaggctaatttttgtattcttagcaaagacagggtttcaccatgttggccaggctggtctcgatctcctgactcaggtgatctgcccgccttcgactcacaaagtgctgggattacaggtgtgagccaccacacctggccagcctgtgagagctttaaaccatgagatagacatatggttttgcaaaagtttctacataaatcagaatggttcccagaacagaaaggctcctctgtcactttttttatctggttgcttaaccataagatgccaacccaattaacagtcacacccatatttgcattatatctgtttcatatgttccgtgtaactgcctcctttcaaagtgttggtatatttttcaagtcaactggaaccaaaagtatagagaaactgaatgcaagccagctttctgcatatgtaacagtgtaagaatccaggttgtatagatgggtttttgtttgacacagatgtttctcccagtaaagagaggataaggagctggaactcgtggcacagttccctacaaaataattaattgatcatgtctactaattaaaatttctttttctgtactattgcagatacctggttttggctgggcaaggtggctcacacctataatcccaacattttgggaggctcacttgaggtgggaggctcacttgagcccaggagtttcagagcaacccgggcaacaaagtgagatcccatccgtacaaaaaattaaaaaattagctgggcatggtggcacatacctctagtccagctattctggaagcttaggtagaaggatcacttgagcctgagagatcaaggccgcagtatgctgtaattgcaccactgcactccaccctgggtgacagagcaaaaccctgtctcaaaaaaaaaaaaaaagagacacctggctttactgtgtatgctgtacctcagggcaagttttccctttgtcttctaatagacactttttggatccagaaattgttctctgcaatttctttacttaaacataattatcagcctgtatgacctctgtggtctgactactttgaaattaagggagaaggctgggcacggtggctcactcctgtaatcccagcactttgggaggctgaggtgggcggatcacttgagcccaagagttcgaggcaacatgacaagaccctgtctcgacaaaaaaacaaaaaacttagccagacatggtgacacacgtttatggtcccagctactcaagaggctgaggcagggggattgcttgagcccaggaggggctcaaggtcggcccaggaggtcaagacccaggcgatcaaggcccaggaggtcaagactgcagtgagctgtgctcacgccccactgcactccagcccagtcatcagagcaaaaccttgtctcaaaaaaaagtaaagaaagacatgtttattatatggtagtttgaaaaattacaaaaaaaagagtaaatcatggccggacgcggtggctcacgcctgtaatctcagcactttgggaggccgaggcgggtggatcatgaggtcaggagatcaaggccatcctggctaacacgatgaaaccccgtctctactaaaaatacaaaaaaattagctgggtgtggtgctgggcctgtagcccagctactcgggaggctgaggcaggagaatggcatgaacctgggaggtggagcttgcagtgagctgacatcgtgccactgcactccagcctgggtgacagagcaagactccgtctc

SEQ ID NO: 18266 - DNA, 3303 bp, Homo sapiens
  CDS (97)..(807)
agggccgtccgctctgctgccgccgctgttgcagccaccgccgttgccgcctccctgccggcaagtgtgtggaagctgagcgttgtcgccgccgctatggggagaaagtcaagcaaagccaaggagaagaagcagaagcggttggaggagcgagcagccatggatgccgtttgtgccaaagtggacgctgccaacaggcttggagaccctctggaggctttcccagtgttcaagaaatatgatagaaacgggttgaatgtctccattgaatgtaagcgagtgtctggactggagccagccaccgtggattgggccttcgacctgaccaaaacgaatatgcaaaccatgtatgagcagagcgagtggggctggaaggaccgagagaaacgggaggaaatgacagatgaccgagcctggtacctcatcgcgtgggaaaacagctccgtccctgttgccttttctcacttccggtttgacgtggagtgtggggatgaagtcctgtactgctatgaagtgcagttggaaagcaaggtgcggcggaaaggcctggggaagttcctcatacagatcctgcagctcatggccaacagcacacagatgaagaaggttatgttaacagtatttaaacacaatcatggtgcctaccagttcttcagagaagcgttgcaatttgaaattgatgactcttcccccagcatgtccggttgctgtggggaggattgctcctatgagatcctgagccggaggaccaagtttggggacagccatcactcccacgcgggtgggcactgtagtggctgctgccactgaactctcagagccactttcaagtcacaatgctctctcctaaggcctttcctctttcctggtctcactgttcaccgggtgtcctcagagctgtggcctccccagccctgcacgtgccaggctgcgccctgagagcacagaaccctggggagaagtggtatcagctgctcctcctctcctaggagaccagagtgctagaagggaatgaaagggagagggaagagtaggtggggccgggcagtgaagctcatcctccacagtggctgcctcctcatttggctcctggggcctgcagtggaggttctcgcacctctgcagcccctagattcctggcaacctcccctcccctgacacatacacacttggacaaatggaatgtttatgtccacctttatgaaagttctggagtcctgggtctggggtttgctggtccccaaagaggaacacactgggtgtaagatctgggtgtagagggcggcttcagagagactcacgcttgcgcagttggaattgctgttaacggagactgggaagatcttttgtgccaagatgcagggaaatgaagaaagctctttccagctgtttttatggattcatggagtgggctcatgttgggaccagctgactctgggaggaagactgcctctccatcgctgtcagagagcctgaaaggaccaacaatgaggtgttcttgggacccgccatggggatgattgcttctctaggctcctggatgttgctgcattctaagcttaacctcctggtctcatggcagtgacttgagcttttgattcatagaagaaagccagaggttctgcttgttcttgtctgccagccctcgtcgttctttctcccctgcctctcacctctaccccaaatacctctgttcttagtctcaaggggagaataacatcagggagcccctcatcttccccagaaggacttctcgttcctcatgtagttaactccattgattttcctatcttggtgctgatagctctctaagggtagggcacacctccccacagccaccctccctcttcagagagcccccagccagcagcaggcccctctgcctgcactcctcaggcttgcccctcgctgcctcagtgaggcactagtgccactgccgtggcccagccgggccatagctcaggctgcagcagaaatgcctctcagtggccaacagttgcttttctctctggtgtcaccctgtggcaacaggctggagcaggggaaggagaaagccttcctcttctctcataggatagaaaggcaggctcagaactaatgctcatcctgatctctaggccttgttcctcttccagggaaaaaaagccaaatccttatcaaggaaaaagcacctaacagctccctttggatatccctgagctctgctgtggggagtatcataaaggttctagccttcgtgaagttgttctcgtggaggtctgttggtccctctgacctcagcatctgctcacatcccaccctctgcccaactctggcagtctctcctggcagatctccccagagtggtccttgcttctcacctggattcctgcttgtgcaggagcctgtgtacacagggcctccctcacccagcctggcccctctgctgagcactttgcgctgctcttgatgggcagcagtgggactgggaactccttagagagggccttgcagctttacactggaataagtctgcctctgcctctgcctcaccctgctggctcctggtgggtttcatcccaggcagagttgacattgctggaggggtttggtggactcctaagaatcatgaaaccacaggagcatgtttaggaagagatttgtctctggtccctgtctctgaaaggacacagatgctaaatatttattgtcttagatcatggattcctgatacctctcactcaaggggaccaaaagggacccccccgtgttcatcccttgtaaggtgagttcagtctacgttgtctctttccagtcactggatgcgtggcaccaactggtcaatgggtgcttggtgccataccctgctcaccctagtctctgcaggccatgtcctgaagggttcctcaggaggtcgggactagggtgggagaggcactatctgagacctgcaatcactcttgttggtcttgagcccattcatttccaaaacatccatctttctccacttcccccaggtcttggttttgagaaacagcaggcatggctgagtgcggtggcttacacctgtaatcccagcactttgggaggctgaggcaggcgggtcacctgaggtcaggagttcaagaccagcctggtcaacatggcaaaagcccatctctactaaaaaatacaaaaattagccaggcgtggttgtggcctgtaatcccagctactcgggaggctgaggcaggagactcgcttgaacccaggaggtggaggttgtggtgagctgagatcacgccattgcactccagcctaggcgacagagtgagactccatctc

SEQ ID NO: 18267 - protein, 237 aa, Homo sapiens
MGRKSSKAKEKKQKRLEERAAMDAVCAKVDAANRLGDPLEAFPVFKKYDRNGLNVSIECKRVSGLEPATVDWAFDLTKTNMQTMYEQSEWGWKDREKREEMTDDRAWYLIAWENSSVPVAFSHFRFDVECGDEVLYCYEVQLESKVRRKGLGKFLIQILQLMANSTQMKKVMLTVFKHNHGAYQFFREALQFEIDDSSPSMSGCCGEDCSYEILSRRTKFGDSHHSHAGGHCSGCCH

SEQ ID NO: 18268 - DNA, 2331 bp, Homo sapiens
  CDS (27)..(848)
agcgcagcggcgtccgaggcaacaagatggcagctgcggagccgtctccgcggcgcgtgggcttcgtgggcgcgggccgcatggcgggggccatcgcgcagggcctcatcagagcaggaaaagtggaagctcagcacatactggccagtgcaccaacagacaggaacctatgtcactttcaagctctgggttgccggaccacgcactccaaccaggaggtgctacagagctgcctgctcgtcatctttgccaccaagcctcatgtgctgccagctgtcctggcagaggtggctcctgtggtcaccactgaacacatcttggtgtccgtggctgctggggtgtctctgagcaccctggaggagctgctgcccccaaacacacgggtgctgcgggtcttgcccaacctgccctgtgtggtccaggaaggggccatagtgatggcgcggggccgccacgtggggagcagcgagaccaagctcctgcagcatctgctggaggcctgtgggcggtgtgaggaggtgcctgaagcctacgtcgacatccacactggcctcagtggcagtggcgtggccttcgtgtgtgcattctccgaggccctggctgaaggagccgtcaagatgggcatgcccagcagcctggcccaccgcatcgctgcccagaccctgctggggacggccaagatgctgctgcacgagggccaacacccagcccagctgcgctcagacgtgtgcaccccgggtggcaccaccatctatggactccacgccctggagcagggcgggctgcgagcagccaccatgagcgccgtggaggctgccacctgccgggccaaggagctcagcagaaagtaggctgggctctggccatcctttcctgcctctgtgcccctgcctctccctgtgtcccttcccctgaggactgcggctccctccctcctgcatgagggtctcctactgctccttctccccttgcacagggaaatgcagggggcaggacttgggaggttccagcaggcgggggagccccgaccagtggggacactcctccctccccagtgagcagaaggcaccgtggtggtggctctgccccttgctgcagtgagcccaccttgctgcaacattggttctgaggggcccaagagatggcgtcttggtcatttgcccgcatggttgggcagttggttgaggccatgaacagaacttacggtaacaggcacggctggcccaatgcctggtctggagctggagcttgcctttggctttccaggtggctccgtgcagctacagccaggccggctgcctcatctcagctctagggggcacgagccatatggggtctgcacaagagaccctctcccctgcagtaaagccaggggccctggcctgatggggcccccatggggagctggagcctgccctgcagcctggagaagagggtggctgtggtgggcgtgctcatcccctgctaaggagcaggagctgctgggccaggtctgcggcagtgctggggtggcaccaggtgggcagtggtaggtggggtggcttgaggtctgggagggtggccctggccagccaggacacatgcagacccctggcttagtctggatacaggctccctctttcctcccaatcctaagctcctgacaagtggccaggtggctctgggccctcctgccccgtgcctaggtcaggggtcctggaataccccgtagctctggcaccaccacactggcctctgatggcaagacttggcccctccacctgtccctaacggacggcaggtcaggaaagccaggactcaggggagaagcaaacccccaggattgaaggctagggttctagggcctttgggtggggagggcccgggccggacagcctcagctccgtcccctgccccacaagattcacctgggcctccagtcccacgctggccccaactgctgcagctctcggcttccgcccaacagcctctggaggtgaggcgggagcatgccctcagcgaggctgggcggcgggtcctgctgtgccatctccctgtgcgcctgagcagatcaatccaccagtgcaaaacagggctaacggcacctgcaggacagcagcacgctccatccctcatgctcagctgcctctgcggccacggacttctgcccttcatctgctctctcttactctcctgagcctagcccgtccgtaagctccctcccctgcctggttcccagggcaggctgactcagttgactgcttggtccaagcctggccctggcacttgtcagggtcagcctaaggagatgggaataaagaggccagagagcaccaagtgagctcatgtttc

SEQ ID NO: 18269 - protein, 274 aa, Homo sapiens
MAAAEPSPRRVGFVGAGRMAGAIAQGLIRAGKVEAQHILASAPTDRNLCHFQALGCRTTHSNQEVLQSCLLVIFATKPHVLPAVLAEVAPVVTTEHILVSVAAGVSLSTLEELLPPNTRVLRVLPNLPCVVQEGAIVMARGRHVGSSETKLLQHLLEACGRCEEVPEAYVDIHTGLSGSGVAFVCAFSEALAEGAVKMGMPSSLAHRIAAQTLLGTAKMLLHEGQHPAQLRSDVCTPGGTTIYGLHALEQGGLRAATMSAVEAATCRAKELSRK

SEQ ID NO: 18270 - DNA, 2136 bp, Homo sapiens
  CDS (397)..(708)
gaaattagggctcagggaagtctggtggggaaagcacagagctgtttaaatagaattgtagtgtccagagtaagggaagtgaaagcctcacttctctcccatgtgcttggagtaggatgtagactcttcaggtctggccaccctactatacggggagacattgacacagcagttccaaagagagcagccagggaggtaaaaaggccaatccccacttttttttttttttttttagagaagaccaagacaaagaaaaaggataattgatttggaaaagacttgaagagggatcggtgtctttacctaattaaaagatttgctcaggaaagagaaattagaccaactctgtcgttttggaagtagaatctagggccagcgggtgggagatgagaacacatggagctgggaataaaacgggcagcttcctcaatggtgagcaaagccaagggaagcagggctggggaagtgctgctgaggaaacctcaaggattggaccggatggcctccgagtcccttcccactctcagagtctgtgatcctaatcaggggactcaacagaaacttaagggaaaccccctgacttctcgactcgatgtatctattggagctggatttttacaccccgtgttagcagtaacagattggcaaagcaatagaaaacaaatgcaccaattcatgtttttcagaaacttaacaaaagttagcccctgaagtcatttctgtgttatgtgtgtggaggaacactgccggaggaccctgaccagctctgccaactcttttttttctttttttggatctcactctgtcatccaggctggagtgcagtggcacaatcacggctcacggcctcaacctcccaaagtgctgggattacaggtgtgagccacacagcacccagcccgtgctggtcttgacctcccaggctcaagccttccaagaggctgggactgcaggcatgtgcccccatgcctggctaactttaacttttgtagagacgaggtcctgctgtgttgccagtgctggtcttgaactcctgggcccaagcgatcctcctgcctcagcctcgtgagccaccacatcgggcaagccctgccaactctttcctgacctgaggcagggctgaatgtaggaggttagggaattagaaacctaagggttgtcttgtttaattattattccggctatgtggagatctgagccattttccgttgtaagggtccttctggttgatgtgtatatgttgtggtttttgctttttttttttttttttggcaggtgtgcgagggacattttgagattgttccaattcattgtcatgattgagggattatgattaggattctgtaaagtaactagtccaggccaggtgtggtggctcgcgcctgtaatcccagcactttgggaggctgagctgggtggatcgcctgaagtcaggagttcaagaccagcctggccaacatggtgaaacctatctctactaaaaatacaaaaattagccgggtgtggtggcacgtgcctgtaatcccagctactcgggaggctgaagcaggagaatcacttcagcccgggaggcggaggttgcagtgagccaagatcctgccactgcactcgcgtctgggcgacagagtgagactccatctcagaaataaaaatttaaaaaaaaattagtccagaaaaacatctcacagctgaagtggtctcatgggaagggagaacagcactgcccaataggaatgctataatgggagccatagatctaaaatcaaattttagattttccaggagccacattaaaagaagtaaaaagaagcagataatatgaatttaaagaatgtattttatgccaggtgtggtggctctcgcctgtaatcccagcactttggggagccgaggtgggcggatcacttgaggtcaggagtttgagaccagcctggccaacatggtgaaaccccaactctactaaaaatacaaaaaactagccaggcgtggtggcttgtgcctgtaaccccagctactcgggagactgaagcaggagaaacgcttcagcgatttaggagaaccaggaggcagaggttgtggtgagttgagatcatgccactgtactccagcctgggtgacagagcaagactctgtctc

SEQ ID NO: 18271 - protein, 104 aa, Homo sapiens
MELGIKRAASSMVSKAKGSRAGEVLLRKPQGLDRMASESLPTLRVCDPNQGTQQKLKGNPLTSRLDVSIGAGFLHPVLAVTDWQSNRKQMHQFMFFRNLTKVSP

SEQ ID NO: 18272 - DNA, 2255 bp, Homo sapiens
  CDS (52)..(2166)
actgcgccatttcctgtccaaagctgggcgaatcagggattccggttcacaatggatgctgataaagagaaagatttgcagaaatttcttaaaaatgtggatgaaatctccaatttaattcaggagatgaattctgatgacccagttgtgcaacagaaagctgtcctggagacagaaaagagactactgcttatggaggaagaccaggaggaggatgaatgcaggaccaccttgaacaagactatgatcagtcctccacaaactgctctgaagagtgcagaagaaataaactcagaggccttcttggcatctgtggagaaggatgcaaaggaacgagccaagagaagaagggaaaacaaagtcttggcggatgccctaaaagaaaaagggaatgaagcatttgctgaaggcaattatgaaacagctatcctgcgctacagtgagggtttggagaagctgaaggacatgaaagtgctgtacaccaaccgagcccaggcttatatgaaacttgaggactatgagaaggcactggtggattgtgagtgggctctcaagtgtgatgaaaaatgcacaaaagcatattttcacatgggaaaagccaacctggccctgaagaactacagtgtgtctagagagtgttataagaagatcttagaaataaaccccaagctgcaaacccaggtgaaaggttacctgaatcaagtagatcttcaggaaaaagcagaccttcaagaaaaggaagcccacgaactgctggattcaggaaagaacacagccgtgaccaccaagaacctcctggagaccctttccaagcctgaccagatccccttgttctatgctggggggattgagatcctgactgaaatgataaatgagtgcacagaacaaactttattcagaatgcacaatggatttagtatcatcagtgacaacgaggtcataagaaggtgtttttccacagcaggaaatgatgcagttgaagaaatggtctgtgtgtctgttctcaagctctggcaagcagtgtgcagcaggaacgaggaaaaccagcgtgtgctagtgatacaccatgacagggccaggctgttggccgccctcttgtcctccaaggtcctggccatccggcagcagagctttgccctgctgctgcatctcgcccagactgagagcggacggagcctgatcatcaaccaccttgacctgaccagattattggaagcgctggtgtcatttcttgatttctcggataaggaggccaacactgctatgggactgttcacagacttggctctggaagaaagattccaagtctggttccaggccaaccttccaggtgttctccctgcactcacaggcgttctgaagacagatcccaaggtaagcagctcctcggctctgtgccagtgcattgccatcatgggaaacctcagtgctgagcccactacccgaagacacatggcggcctgtgaggaatttggggatggctgcttgagcctcctggccaggtgtgaggaggatgtggacctgttcagagaggttatctacacactcctgggactcatgatgaacctgtgtcttcaggctccctttgtctctgaggtttgggctgtggaggtgagcagaaggtgcctgtctttactaaacagccaggatggaggaatcctgacaagagctgctggtgttctgagccggaccctttcttcctctctgaaaattgttgaggaggccttgcgagcaggagtggtaaagaaaatgatgaaattcctgaagacaggaggtgagactgcatcacgttatgctataaagatactagctatctgcacgaatagttatcatgaagctcgggaagaagtaataagactggataaaaagttgagcgttatgatgaagctgctcagctcggaggatgaggttctggtgggcaacgctgccctctgccttggtaactgcatggaggtgcccaacgttgcgtcttccctgctaaagacggaccttttgcaggtcttgttaaagcttgcaggcagtgacacacagaagacggccgtgcaggtgaacgcaggcattgctctggggaagctgtgcacagctgagcccagatttgctgctcaactgagaaagcttcatggcctagaaattctcaactctacgatgaaatacatcagtgattcttgagagagacagggtttgtgtgcatttggggaacacacagatgcacaccgtgtgttgttcctatgctaataaagacctttgatgtatcc

SEQ ID NO: 18273 - protein, 705 aa, Homo sapiens [sequence omitted]

SEQ ID NO: 18274 - DNA, 2474 bp, Homo sapiens
  CDS (213)..(2078)
ggactctggctgccttctcctgagagtcggagccacagccagagccctgcccaggccgagccggagctgcagcccgagcgcggtggtgccctcagccccgtcctcttgtcctcctcagcctcgatctgccggaggcgctgggcaatgaccccgggactccaggccagaggggtctgaagctgtttgggaaagcagcgggactccttgggaagatggccatggccccaagcccttccctggtgcaggtgtacaccagccccgcggctgtggccgtgtgggaatggcaggacgggctgggcacctggcacccctacagtgccaccgtctgcagcttcatcgagcagcagtttgtccagcagaagggccaacgttttgggcttgggagcctggcccacagcatccccttgggccaggcagacccctcgctggccccttacattattgacctccccagctggacccagttccgccaggacaccggcaccatgcgggctgtgcggagacacctgttcccccagcactcagcccctggccgaggtgtcgtctgggagtggctgagcgacgatggctcctggactgcctatgaagccagcgtctgtgactatctggagcagcaggtggccaggggcaaccagctcgtggacttggcccccctggggtacaactacactgtcaactacaccacccacacgcagaccaacaagacttccagcttctgccgcagcgtgcggcgccaagcagggccgccttacccggtgaccaccatcatcgctccgccgggccacacaggcgtcgcctgctcttgccaccagtgcctcagtggcagcagaactggccccgtgtcaggccgctaccgccactccatgaccaacctccctgcataccccgtcccccagcaccccccacacaggaccgcttctgtgtttgggacccaccaggcctttgcaccgtacaacaaaccctcactctccggggcccggtctgcgcccaggctgaacaccaccaacgcctggggcgcagctcctccttccctggggagccagcccctctaccgctccagcctctcccacctgggaccgcagcacctgcccccaggatcctccacctccggtgcagtcagtgcctccctccccagcggtccctcaagcagcccagggagcgtccctgccactgtgcccatgcagatgccaaagcccagcagagtccagcaggcgctcgcaggcatgacgagtgttctgatgtcagccattggactccctgtgtgtcttagccgcgcaccccagcccaccagccctcccgcctcccgtctggcttccaaaagtcacggctcagttaagagattgaggaaaatgtccgtgaaaggagcgaccccgaagccagagccagagccagagcaggtcataaaaaactacacggaagagctgaaagtgcccccagatgaggactgcatcatctgcatggagaagctgtccgcagcatctggatacagcgatgtgactgacagcaaggcaatcgggtccctggctgtgggccacctcaccaagtgcagccatgccttccacctgctgtgcctcctggccatgtactgcaacggcaataaggatggaagtctgcagtgtccctcctgcaaaaccatctatggagagaagacggggacccagccccagggaaagatggaggtattacggttccagatgtcgctccccggccacgaggactgcgggaccatcctcatagtttacagcattccccatggcatccagggccctgagcaccccaatcccggaaagccgttcactgccagagggtttccccgccagtgctaccttccagacaacgcccagggccgcaaggtcctagagctcctgaaggtggcctggaagaggcggctcatcttcacagtgggcacgtccagcaccacgggtgagacggacaccgtggtatggaacgagatccaccacaagacagagatggaccgcaacattacgggccacggctatcccgaccccaactacctgcagaacgtgctggctgagctggctgcccagggggtgaccgaggactgcctggagcagcagtgacctcgcaccccagcacgcccgcctctggtggccaccccgctgccccatggctggctgggtggccaggcaggaagtgcccagcccgagaggctgggaggtttgttgagggtgtggggtgtgccccacctgaagccggggctccccctgcctgcctctctctcctcctcccctctgggaattgggcagccctgggcagttgtactcatgggggcttaagatgcagctacctcagtgcgcagggcccgtctgtcctctgggggctgcttcgggcccgcggtgctcggggcctggtgtggggcgagtagagacttccccagcctggacgggcgtgggttctgggtcagcttcttttacctcaattttgtttgcaataaatgctctatagccaaagcc

SEQ ID NO: 18275 - protein, 622 aa, Homo sapiens
MAMAPSPSLVQVYTSPAAVAVWEWQDGLGTWHPYSATVCSFIEQQFVQQKGQRFGLGSLAHSIPLGQADPSLAPYIIDLPSWTQFRQDTGTMRAVRRHLFPQHSAPGRGVVWEWLSDDGSWTAYEASVCDYLEQQVARGNQLVDLAPLGYNYTVNYTTHTQTNKTSSFCRSVRRQAGPPYPVTTIIAPPGHTGVACSCHQCLSGSRTGPVSGRYRHSMTNLPAYPVPQHPPHRTASVFGTHQAFAPYNKPSLSGARSAPRLNTTNAWGAAPPSLGSQPLYRSSLSHLGPQHLPPGSSTSGAVSASLPSGPSSSPGSVPATVPMQMPKPSRVQQALAGMTSVLMSAIGLPVCLSRAPQPTSPPASRLASKSHGSVKRLRKMSVKGATPKPEPEPEQVIKNYTEELKVPPDEDCIICMEKLSAASGYSDVTDSKAIGSLAVGHLTKCSHAFHLLCLLAMYCNGNKDGSLQCPSCKTIYGEKTGTQPQGKMEVLRFQMSLPGHEDCGTILIVYSIPHGIQGPEHPNPGKPFTARGFPRQCYLPDNAQGRKVLELLKVAWKRRLIFTVGTSSTTGETDTVVWNEIHHKTEMDRNITGHGYPDPNYLQNVLAELAAQGVTEDCLEQQ

SEQ ID NO: 18276 - DNA, 2210 bp, Homo sapiens
  CDS (1)..(1770)
atggcgggggccgtgccgggcgccatcatggacgaggactactacgggagcgcggccgagtggggcgacgaggctgacggcggccagcaggaggatgattctggagaaggagaggatgatgcggaggttcagcaagaatgcctgcataaattttccacccgggattatatcatggaaccctccatcttcaacactctgaagaggtattttcaggcaggagggtctccagagaatgttatccagctcttatctgaaaactacaccgctgtggcccagactgtgaacctgctggccgagtggctcattcagacaggtgttgagccagtgcaggttcaggaaactgtggaaaatcacttgaagagtttgctgatcaaacattttgacccccgcaaagcagattctatttttactgaagaaggagagaccccagcgtggctggaacagatgattgcacataccacgtggcgggaccttttttataaactggctgaagcccatccagactgtttgatgctgaacttcaccgttaagcttatttctgacgcagggtaccagggggagatcaccagtgtgtccacagcatgccagcagctagaagtgttctcgagagtgctccggacctctctagctacaattttagatggaggagaagaaaaccttgaaaaaaatctccctgagtttgccaagatggtgtgccacggggagcacacgtacctgtttgcccaggccatgatgtccgtgctggcccaggaggagcaggggggctccgctgtgcgcaggatcgcccaggaagtgcagcgctttgcccaggagaaaggtcatgacgccagtcagatcacactagccttgggcacagctgcctcctaccccagggcctgccaggctctcggggccatgctgtccaaaggagccctgagccctgctgacatcaccgttctgttcaagatgttcacaagcatggaccctcctccggttgaacttatccgcgttccagccttcctggacctgttcatgcagtcactctttaaaccaggggctcggatcaaccaggaccacaagcacaaatacatccacatcttggcgtacgcagcaagcgtggttgagacctggaagaagaacaagcgagtgagcatcaataaagatgagctgaagtcaacgtcaaaagctgtcgaaaccgttcacaatttgtgttgcaacgagaacaaaggggcctctgaactagtggcagaattgagcacactttatcagtgtattaggtttccagtggtagcaatgggtgtgctgaagtgggtggattggactgtatcagaaccaaggtactttcagctgcagactgaccatacccctgtccacctggcgttgctggatgagatcagcacctgccaccagctcctgcacccccaggtcctgcagctgcttgttaagctttttgagactgagcactcccagctggacgtgatggagcagcttgagttgaagaagacactgctggacaggatggttcacctgctgagtcgaggttatgtacttcctgttgtcagttacatccgaaagtgtctggagaagctggacactgacatttcactcattcgctattttgtcactgaggtgctggacgtcattgctcctccttatacctctgacttcgtgcaacttttcctccccatcctggagaatgacagcatcgcaggtaccatcaaaacggaaggcgagcatgaccctgtgacggagtttatagctcactgcaaatctaacttcatcatggtgaactaatttagagcatcctccagagctgaagcagaacattccagaacccgttgtggaaaaaccctttcaagaagctgttttaagaggctcgggcagcgtcttgaaaatgggcaccgctgggaggaggtggatgacttctttacaaaggaaaatggtagcagcttcagtgagaaactgcccttacaaacagtcccttctctgctgtcaatccaatactgctcccaaatcctgttttcagtgttcatttccctcaaggcaggcgctgggctcccacgacccctcaggacagatctggccgtcagccgcgggccgctgggaactccactcggggaactcctttccaagctgacctcagttttctcacaagaacccagttagctgatgttttattgtaattgtcttaatttgctaagaacaagtaataagtaaatttttaaaaagcc

SEQ ID NO: 18277 - protein, 590 aa, Homo sapiens [sequence omitted]

SEQ ID NO: 18278 - DNA, 3033 bp, Homo sapiens
  CDS (1034)..(1444)
aaatgtgccctgctctctcccctcttaaaaatagcagcaacccatctttgcaaagaagcttgcctatagagctggcactctgtgaatggactgtgcttttacgaccctacagggtatcaagatactgtgcagctcgccaacaaggattaattgcaaggactggtagatcgaatttactgaagacttggagctcgcttctgagaacaaacgcaaaaggacagtaaactgtggaccttgaagttagcagggtttcactcttgttgcccaagctggagtgcaatggtaaaatctcggctcaccacagcctccgcctcccgggttcaagcagttctcctgcctcagcctcctgagtagctgggattacaggcatgtgccaccacgcccagctaattttgtatttttaggagagatggtgtttctccatgttggtcacgctggtctcaaactcccgacctcaggtgattcactcaccttggtctcccaaagcgctgggattacaggcatgagccaccgctatgccgtctttgttttaagatctttgcctccctttctgcccaaatgtgtagattcaatctgctccaccccctttcctttcttctctggtgatttgtaaaatgcccatccatgagtcatggtcccctgcactctgtgaattttcaggcttcttttaaatagattctaccctactagatatatccacattttactatcactttacaccattatttagattcttgtataacagcacctgcacttacacacacacacacacacacacacacacacacacacgtgctccttcctctgatcctagacatccaccctgggaaattagatgctctattactcaaaagctcttaagaccacaaagttactcttcaaagttgcccaattaggagaggaaaagagcaaaaaatgaagaaagcaactcactgctactaatgagctatgagcttactgtctaaatgggtgtgacagacatgtaagcaaaaagagtaattacagcaataacagaaaaacagagagccaaatcatgagtgaactcccattcacaattgcttcaaagagaataaaatacctaggaatccaacttacaagggatgtgaaggacctcttcaaggagaactacaaaccgctgctcaatgaaataaaagaggatacaaacaaatggaagaacattccatgctcatgggtaggaagaatcaagatcgtgaaaatggccatactgcccaaggtaatttatagattcaatgccatccccatgaagctaccaatgactttcttcacagaattggaaacaactactttaaagttcatatggaaccaaaaaagagcctgcattgccaagtcaatcctaagccaaaaggagaaagctggaggcatcacgctacccaacttcaaactatactacaaggctatagtaaccaaaacaacatggtactggtagcaaaacagagatatagaccaatggaacagaacagagccctcagaaataatgccacatatctacaactatctgatctttcacaaacctgacaaaaaacaagcaatggggaaaggattccctatttaataaatggtgctgggaaaactggctagccatatgcagaaagctgaaactggatcccttccttacaccttatacaaaaattaattcaagatggattaaagacttaaatattagacctaaagccataaaaaccctagaagaaaacataggcaataccattcaggacataggcatgggcaagtacttcatgtctaaaacaccaaaagcaatggcaacaaaagccgaaattgacaaatgggatctaattaaactaaagagcttctgcacagcaaaagaaactaccatcagagtgaataggcaacctatagaatgggagaaaatttttgcaatctactcatctgacaaagggccaatatccagaatctacaatgaactcaaacaaatgtacaagaaaaaaacaaccccatcaaaaagtgggcgaaggatatgaacagacacttctcaaaagaagacatttatgcagccaacagacacatgaaaaaatgctcatcgtcactggccatcagagaaatgcaaatcaaaaccacaatgagataccatctcacaccacttagaatggcaatcattaaaaagtaaggaaacaacagatgctggagaggatgtggagaaataggaacacttttacactgttggtgggtttgtaaagcagtccaaccattgtggaagtctgtggcgattcctcagggatctaaaactagaaataccatttgacctagccatcccattactgggtatatacccaaaggattataaatcatgctgctataaggacacatgcacacatatgtttattgtggcactattcacaatagcaaggacttggaaccaacccaaatgtccaacaatgatagactggattaagaaaatgtggcacatatacaccatggaatactatgcagccataaaaaatgatgagttcatgtcttttgtagggacagggatgaagccggaaaccatcattctcggcaaactgacgcagggacagaaaaccaaacactgcatgttctcactcataggtgggaattgaacgatgagaacacatggacacaggaaggggaatatcacacactggggcctgttgtggggtggggggaggggggagggatagcattaagagatatacctaatgttaaatgacgagttaatgggtgcagcacaccaacatggcacatgtatacatatgtaacaaacctgcacgttgtgtacatgtaccctaaaacttaaagtataataaaaaaaaagaaaattaaacaactttaaaaaaagagtaattacagcactgtaataaatgaaccatgcacatgggagtattcatagagaatgataacttcaacctaaatcttgaagtataagtataaatttgccaggttcacctcttgattatttaagtgtgaaagaggatgcatagatcaccttcaagtagctaaggcataatgagataaggatgctgaactaagttggtt

SEQ ID NO: 18279 - protein, 137 aa, Homo sapiens
MSELPFTIASKRIKYLGIQLTRDVKDLFKENYKPLLNEIKEDTNKWKNIPCSWVGRIKIVKMAILPKVIYRFNAIPMKLPMTFFTELETTTLKFIWNQKRACIAKSILSQKEKAGGITLPNFKLYYKAIVTKTTWYW

SEQ ID NO: 18280 - DNA, 2760 bp, Homo sapiens
  CDS (13)..(1416)
caaaagctcggcatggctgacgacgcgggtttggagaccccgctgtgttccgagcagttcggctccggggaggcacggggctgccgcgccgccgcggacgggagcctgcagtgggaggtcgggggctggcgctggtgggggctctccagggccttcacggtcaaacctgaaggacgagatgcgggcgaagtgggggcttccggggccccctcaccgcccctctccgggctccaggccgtgttcctgcctcagggcttccctgatagcgtcagcccggactacttgccctaccagctgtgggattccgtgcaggcgtttgcttccagcctctccggctccctagccacccaggcagtcttgctgggcataggggtggggaacgcaaaagccactgtttcagctgccacggccacctggctcgtgaaagattcaactggcatgctgggccgcatcgtctttgcctggtggaaagggagcaaactggactgcaatgccaagcagtggaggctttttgcggacatcctcaatgacgtagccatgttccttgagattatggctcctgtatacccaatctgtttcaccatgaccgtctccaccagcaacctagccaagtgcatcgtgagtgttgctggtggggccactcgggctgccctgaccgtgcaccaggctcggaggaacaacatggctgacgtgtcagccaaggacagcagccaggagacgctggtgaacctggcggggctcttggtcagcctcctgatgctccctctggtgtcaggttgccctggcttcagccttggatgtttcttcttcctcactgccctccacatctacgccaactaccgcgcggtccgagccctggtcatggagaccttgaacgaaggccggctccggctggtcctgaagcactaccttcagaggggagaggtactcgacccaactgcagccaatcgcatggagccgctgtggacaggtttctggccagctccgtctctatccctgggggtccccttacaccgcttggtctccagtgtctttgagctgcagcagctggttgaggggcaccaagaatcctacctcctctgctgggaccagtcacaaaaccaggtacaggtagttctgaaccagaaggcaggccccaagaccatcctaagggccgccacacatgggctgatgcttggggccctgcagggagatggaccccttccagcagagctggaggagctgaggaaccgggtgcgggcaggtcctaagaaagagagctgggtcgtcgtcaaggagacacacgaagtgttggacatgctgttcccaaagttcttgaaaggactgcaggatgccggctggaagaccgagaagcaccagctagaggtgggtgagtggagggccacatggcttctgtctcccgaaaagaaggtcttgtgagcagcccagacggaggcccaagcccagggcaggaacctggagcaaggacactttggccacagcaggacaggggaaaggcagctttatttttccttagggcaactgcagcgggtgggccaggccctcatgggaagtgactgccaatcagatgcagtgggccccaggcagaggaaggccgggagaaggggagccaggaccttctcaccccactgccccttccccttttctggggagcaccgcaggctcctcacccccacttcctgtgaggctgtggcttatggtgtccaacgcagttggtcttaggcatagaagccccagaggaacacggccactgccatcatgagcagggcattgaggttgaccacacgggcccagctcgggtcctcgctgatgtcctccagccgcctggctgctgccgctgcctcctcctgggtaaggggcggaggactgcccaccccacctctgctcattccacaaaaccagagcaggcactggcggaagaggcttggtgccggggcctggggctctgagggaaattgaggccctgcagttagtttgcgggaactcagctcctccagccccacctcccagcatggtgccctaccattcatctccatggcactctctgggcacccattctgtacagggagtgaggagccttgctgctcatcagcatccaggtcctcccgttcctccttgctatgccggagactgaagaccaggcggtggagctggggagggtgggagcacgaacgaggtgggagttctgtccccccatgcctggccctaaagtctcttgcacaccagctcgtcactgcctgccctacccacctctgtccagtctacacacccagcccaggcttaactcatgccaactccaccctacatggctgccctgtgccctcgggataaaccccaagcccctgagcttgtgtttaaagccgttggccttgctcccccagctttgtcagctcaggtctgtctacacccagatggtagcgcttgtgacactggcctggcagtcctgctcacagtgttctgtgcctgtgtgctcccaccctttcctcctgctgctgcagaaacccggccatccttccacacccagatctcttgtcctgtcctcaccccaccctgccaccatcagccctgcctggagccacctgccctttggcaacaaaaccaaacctttttgtgggcgttcaagatggtattgtgcccaccagtcagatcctgtgttttgagtcccaaaggccatgccaaggattggctttgggaggctttaatcaccaacccatcaacatcaagcctcccccaggccggttcaaataaatgtatttaaat

SEQ ID NO: 18281 - protein, 468 aa, Homo sapiens
MADDAGLETPLCSEQFGSGEARGCRAAADGSLQWEVGGWRWWGLSRAFTVKPEGRDAGEVGASGAPSPPLSGLQAVFLPQGFPDSVSPDYLPYQLWDSVQAFASSLSGSLATQAVLLGIGVGNAKATVSAATATWLVKDSTGMLGRIVFAWWKGSKLDCNAKQWRLFADILNDVAMFLEIMAPVYPICFTMTVSTSNLAKCIVSVAGGATRAALTVHQARRNNMADVSAKDSSQETLVNLAGLLVSLLMLPLVSGCPGFSLGCFFFLTALHIYANYRAVRALVMETLNEGRLRLVLKHYLQRGEVLDPTAANRMEPLWTGFWPAPSLSLGVPLHRLVSSVFELQQLVEGHQESYLLCWDQSQNQVQVVLNQKAGPKTILRAATHGLMLGALQGDGPLPAELEELRNRVRAGPKKESWVVVKETHEVLDMLFPKFLKGLQDAGWKTEKHQLEVGEWRATWLLSPEKKVL

SEQ ID NO: 18282 - DNA, 1875 bp, Homo sapiens
  CDS (71)..(1804)
agcagctcccaggatgaactggttgcagtggctgctgctgctgcgggggcgctgagaggacacgagctctatgcctttccggctgctcatcccgctcggcctcctgtgcgcgctgctgcctcagcaccatggtgcgccaggtcccgacggctccgcgccagatcccgcccactacagggagcgagtcaaggccatgttctaccacgcctacgacagctacctggagaatgcctttcccttcgatgagctgcgacctctcacctgtgacgggcacgacacctggggcagtttttctctgactctaattgatgcactggacaccttgctgattttggggaatgtctcagaattccaaagagtggttgaagtgctccaggacagcgtggactttgatattgatgtgaacgcctctgtgtttgaaacaaacattcgagtggtaggaggactcctgtctgctcatctgctctccaagaaggctggggtggaagtagaggctggatggccctgttccgggcctctcctgagaatggctgaggaggcggcccgaaaactcctcccagcctttcagacccccactggcatgccatatggaacagtgaacttacttcatggcgtgaacccaggagagacccctgtcacctgtacggcagggattgggaccttcattgttgaatttgccaccctgagcagcctcactggtgacccggtgttcgaagatgtggccagagtggctttgatgcgcctctgggagagccggtcagatatcgggctggtcggcaaccacattgatgtgctcactggcaagtgggtggcccaggacgcaggcatcggggctggcgtggactcctactttgagtacttggtgaaaggagccatcctgcttcaggataagaagctcatggccatgttcctagagtataacaaagccatccggaactacacccgcttcgatgactggtacctgtgggttcagatgtacaaggggactgtgtccatgccagtcttccagtccttggaggcctactggcctggtcttcagagcctcattggagacattgacaatgccatgaggaccttcctcaactactacactgtatggaagcagtttggggggctcccggaattctacaacattcctcagggatacacagtggagaagcgagagggctacccacttcggccagaacttattgaaagcgcaatgtacctctaccgtgccacgggggatcccaccctcctagaactcggaagagatgctgtggaatccattgaaaaaatcagcaaggtggagtgcggatttgcaacaatcaaagatctgcgagaccacaagctggacaaccgcatggagtcgttcttcctggccgagactgtgaaatacctctacctcctgtttgacccaaccaacttcatccacaacaatgggtccaccttcgacgcggtgatcaccccctatggggagtgcatcctgggggctggggggtacatcttcaacacagaagctcaccccatcgaccctgccgccctgcactgctgccagaggctgaaggaagagcagtgggaggtggaggacttgatgagggaattctactctctcaaacggagcaggtcgaaatttcagaaaaacactgttagttcggggccatgggaacctccagcaaggccaggaacactcttctcaccagaaaaccatgaccaggcaagggagaggaagcctgccaaacagaaggtcccacttctcagctgccccagtcagcccttcacctccaagttggcattactgggacaggttttcctagactcctcataaccactggataatttttttatttttatttttttgaggctaaactataataaattgcttttggctatcat

SEQ ID NO: 18283 - protein, 578 aa, Homo sapiens
MPFRLLIPLGLLCALLPQHHGAPGPDGSAPDPAHYRERVKAMFYHAYDSYLENAFPFDELRPLTCDGHDTWGSFSLTLIDALDTLLILGNVSEFQRVVEVLQDSVDFDIDVNASVFETNIRVVGGLLSAHLLSKKAGVEVEAGWPCSGPLLRMAEEAARKLLPAFQTPTGMPYGTVNLLHGVNPGETPVTCTAGIGTFIVEFATLSSLTGDPVFEDVARVALMRLWESRSDIGLVGNHIDVLTGKWVAQDAGIGAGVDSYFEYLVKGAILLQDKKLMAMFLEYNKAIRNYTRFDDWYLWVQMYKGTVSMPVFQSLEAYWPGLQSLIGDIDNAMRTFLNYYTVWKQFGGLPEFYNIPQGYTVEKREGYPLRPELIESAMYLYRATGDPTLLELGRDAVESIEKISKVECGFATIKDLRDHKLDNRMESFFLAETVKYLYLLFDPTNFIHNNGSTFDAVITPYGECILGAGGYIFNTEAHPIDPAALHCCQRLKEEQWEVEDLMREFYSLKRSRSKFQKNTVSSGPWEPPARPGTLFSPENHDQARERKPAKQKVPLLSCPSQPFTSKLALLGQVFLDSS

SEQ ID NO: 18284 - DNA, 2402 bp, Homo sapiens
  CDS (355)..(1164)
ccctcatccggcacctgcgtgcactctccggcgtcccaagtgagtggaggggggatcccgactccagtccggggccttggccagcggagccgcggtattcggaagcgggaatcccactcagagcccgggcctgtaggggcggggcgtcccgggcacccgggattggggcgtctcccgtcgtgcaccggggcaccggcgactcacccggaaggagaagccgtgatctggctatatggtggggcgcgggcggtgtcgctgtggggagctggtgctgttctcaggagccagcctggatcatttgttggcagtacatattggctgaagtcagttttcatttcaagatgtttccttccaatgggcttttggtgtaggatgtcggagaaccaagaacaggaggaggtgattacagtgcgtgttcaggacccccgagtgcagaatgagggctcctggaactcttatgtggattataagatattcctccataccaacagcaaagcctttactgccaagacttcctgtgtgcggcgccgctaccgtgagttcgtgtggctgagaaagcagctacagagaaatgctggtttggtgcctgttcctgaacttcctgggaagtcaaccttcttcggcacctcagatgagttcattgagaagcgacgacaaggtctgcagcacttccttgaaaaggtcctgcagagtgtggttctcctgtcagacagccagttgcacctattcctgcaaagccagctctcggtgcctgagatagaagcctgtgtccagggccgaagtaccatgactgtgtctgatgccattcttcgatatgctatgtcaaactgtggctgggcccaggaagagaggcagagctcttctcacctggctaaaggagaccagcctaagagttgctgctttcttccaagatcgggtaggaggagctctccctcaccgcctcccagtgaagaaaaggaccatttagaagtgtgggctccagttgttgactctgaggttccttccttggaaagtcccactctcccacccctctcctcaccattatgctgtgattttggaagacccaaagagggaacctccactcttcagtctgtgaggagggctgtgggaggagatcatgctgtgcctttggaccctggtcagttagaaacagttttggaaaagtgagctctcggttctgctctgagatggtcagagaagatgcgggccaggagacttactcaggtgggactgggcacagggcaggtatgtgggaggctgggctgcttagtgtcttctagtcacctctgcttgggctgattgacagaggtcagtcattacagccccttatgcctcttccatgggaacaaatactgtgcagatgtttgtaagttaaacataagacacaggggctgttgcttttgaacagaaccctatattactctcctgggatctgagtttctgcaggtcatttgtatgtaggaccaggagtatctcctcaggtgaccagttttggggacccgtatgtggcaaattctaagctgccatattgaacatcatcccactgggagtggttatgttgtatccccatcttggctggcttcagtttttgctgtagccctagagcactttgtttgtgggaggctggcctcttgcctacctccttgcatggacagggggatgaatatttactttcccacctccttgctttttctttcactgataccactgaatggaactggtgctgtgactcctgctgctggggatttatgtcccgagaccttagcctggctgagtggagcctgagacctgcacaacagctcatggtcatgcatgagagagaagtggctggccacagccagagggaacagtaacagcccaggggcctttattttgggaaaggctgtccggggctgttactgtctcttctggttataaagcagacatgtggccatcttttccgcagggttagagtgggctcctttctttttggaatccttttcttctcctttggtagcagctccctgcctccagggcttccgccaccagcgtctctgctgtgttgcgcagtgcagtggggtgcaagggctttgtttctgcctgcctgaaagagagggctctggggatggagatgagaaacaacacgctctccttcagacaatgaggcattctgtcctcctgctgccattcttcatctccactgagagccagagctggtaggagccgagtgccacaggcattctgcattgctctactcttaggtttgtgtgtgtgatccttcccctccctgtcgcccactcctccctcctctggctatcctaccctgtctgtgggctcttttactaccagcctatgctgtgggactgtcatggcatttagttcagagtggaggggctttggcctgaaataaaatgcaagtattt

SEQ ID NO: 18285 - protein, 270 aa, Homo sapiens
MGFWCRMSENQEQEEVITVRVQDPRVQNEGSWNSYVDYKIFLHTNSKAFTAKTSCVRRRYREFVWLRKQLQRNAGLVPVPELPGKSTFFGTSDEFIEKRRQGLQHFLEKVLQSVVLLSDSQLHLFLQSQLSVPEIEACVQGRSTMTVSDAILRYAMSNCGWAQEERQSSSHLAKGDQPKSCCFLPRSGRRSSPSPPPSEEKDHLEVWAPVVDSEVPSLESPTLPPLSSPLCCDFGRPKEGTSTLQSVRRAVGGDHAVPLDPGQLETVLEK

SEQ ID NO: 18286 - DNA, 3422 bp, Homo sapiens
  CDS (83)..(3100)
aacatcctatgctcagctccttgcagcaacatgtctttcaaaacttgtcagccgagtcagtcctttacctgttgagcagaggatggacatcagaaactacattctgaattacgtggcatcacagcccaagctggctccctttgtcatccaagctcatattcaagtcattgctaaaatcactaagttggggtggtttgaggttcagaaagaccaatttgtcttcagagaaattattgctgatgtgaagaagtttctccagggtactgtggaacactgcataataggagtaataatcctttctgaattgactcaggaaatgaacctggttgattattctagaccttcagcaaaacacaggaaaatagctacctcatttcgtgatacttctctcaaagacgttttagtgctagcatgctctcttttaaaagaggcgtttgccaaacctttaaatcttcaggatcaatgtcagcaaaatctggtaatgcaggtcttgaaactggtccttaactgccttaactttgacttcattggcagttcagcagatgaatctgcagatgatctttgcacggtgcagattccaacaacttggagaacaattttcctggaaccagaaacattggatcttttcttcaatttgtatcattcacttccaccactactatctcagttagcactttcatgtttagttcagtttgcttcgacaagaaggtccttatttaacagtcctgaacgtgccaagtaccttggtaatttaattaagggagtaaaaaggatacttgaaaaccctcagggtttgtctgatccaggtaattatcatgaattttgtcgatttttggctcgtttaaagacaaattatcagctgggggaattagttatggtgaaggaatatcctgaagttattagattgattgctaattttaccattactagcctacagcactgggaatttgctcctaacagtgttcattatttattaactctgtggcaaaggatggtagcatctgttccttttgtgaaatcaactgaaccccacctattagacacttatgcaccagaaatcacgaaggcctttatcacttctcggttggactctgttgccatagttgtgagagatcacttagatgatccactggatgatactgccactgtgtttcagcagttggagcagttgtgcacggtcagcagatgtgaatatgaaaagacatgtgctcttcttgtgcagttattcgaccaaaatgcacagaattaccaaaaacttctgcatccatattctggtgtaactgtggacatcaccattcaggaaggacgtcttgcatggctggtatacttagttgggacagttgtaggaggaagattaacatataccagtacagatgagcatgatgctatggatggagaattatcctgtcgagtttttcagcttatatctttaatggataccggattgcctcgatgttgtaatgagaaaatagagcttgcaattctgtggttcttggatcagtttcgtaaaacatatgttggtgatcaacttcaaagaacctcaaaggtatatgctcgtatgtcagaagtcttaggaataacagatgacaaccacgttctagagacgttcatgacaaaaattgttacaaaccttaaatactggggaagatatgagcctgtaatttcaaggactcttcagttcctaaatgacctttctgttggttatatccttttaaaaaaacttgtgaagatagatgctgtgaaattcatgctaaaaaaccacacgagtgaacacttcccttttcttggcatcagtgacaatcatagtctcagcgacttcaggtgtcgaacaaccttctacacagcgctcactcgccttctgatggtagatctgggtgaagatgaggatgaatttgagaatttcatgctgcctcttacagttgcttttgaaacagtattacaaatattcaacaacaactttaaacaagaagatgtaaagcgtatgttgatcgggctggcaagagatcttcgagggattgcctttgcactgaacacaaagaccagctacaccatgctgtttgactggatgtacccaacgtaccttccccttcttcagaatgctgttgaacggtggtatggagagccaacatgtacaactcccatcttgaaacttatggcagaacttatgcaaaacagatcccagcgtttgaattttgatgtatcatctcctaatggaattcttctcttcagagaagctagtaaaatggtttgcacttatggtaatcagatcctgtcccttgggagcctctcaaaagatcagatttatccaatgaaactcaagggcatctccatctgctattcagctctcaagtctgccttgtgtggaaattatgtcagctttggcgtcttcaagttgtatggggacaaccattttgacaatgtactccaggcttttgtcaaaatgctgctgtcagtgtcccacagtgacttgctacaataccggaaactgagccagtcttattatccactcctggaatgtctcactcaggaccatatgagcttcatcatcaacttagagcctcctgtactcatgtatgttctcacatctatctcagagggactcactactcttgatacagttgtctcctccagctgctgtaccagtttagactacatcgtcacctacctcttcaagcacatagcaaaagagggcaagaagccacttcgatgcagagaggctacccaggctggtcagagactattacattttatgcagcaaaacccagatgtcctgcagcagatgatgtctgtcctcatgaacaccattgtctttgaagactgtcggaaccagtggtcagtatccaggcctctcctggggctcatcctgctcaatgagaagtatttcagtgaactgagagcaagtttgataaacagccagcccctccccaagcaggaggtccttgcccagtgcttcagaaacctaatggaaggagtggagcagaacctgtccgtcaagaacagagacaggttcacccaaaatctgtctgtattcagaagagatgtggcagaggcgttgcgcagtgatggcaacactgaaccatgcagtctcgacatgatgagctgacccgacttttctgaccatgtgcggagcagcctttatcaagagactcctgaaggtctgggtctcaggacagtgatgttggctagcccaggggaatgtatttttcaaaacatacaagcaacagcaaaagccctaacttcttatacgtctagcctaattataagaatttctaacagtaccagtgtaaattcagtcttttctctgaaaagcaaaggatgtgttttcagtctttctatcaaatattatctttgttctcctaatgctctgaaaggatgtagaaacaatatttaaccaaagaacgtaataaaccaggtttgcacct

SEQ ID NO: 18287 - protein, 1006 aa, Homo sapiens [sequence omitted]

SEQ ID NO: 18288 - DNA, 2234 bp, Homo sapiens
tttcatagagatggggtctcactatgttgcccaggctgttctcaaactcctggcctcaggcgatccaccttggcctcctgaagtgctggggttacaggtgtgagccactgcgcctggactgagtgtttgtttctttaaaggatcttatatttttcctgtgctacataccaccacagcagcccagcttctgtggggagagaagttgaaggatcccgaagctttagaaaaaggatctcagctgtggcacaggcagtgttatgcgcctcactgccacattggtgctgttgtattgaaggtggtgcttctggccttggcccttttgagttggtttccatttgggctgcaggtgactcagtgactccctcctcaagctgtcctcctgctaagaccagcagtcacaaacccatggcaagggtgagtgtgaaggcctaaccctgtgcctatgtaataggctccaagcatcgactcccatcctgagaggaccggcccttttgacactcaccaaccaaatctgttcattcgatagagtgaccaggcctccctcacctgcccaggtgtatgatcctacagttcctgccttctctcctaccccgcacagctgccaactggtcctacatcctcagcccctctgccaccaccttaaataggactttactgattccccaactttgtttttttgtaggatgagatttcctttttatcccacccccccacaccccaaacagacattgctggagggcagactggaggaaggggaaggcatgcaggtaaattactgccttgtcagcctctgaccctcatctctcagaattgttggctgagaattaacccaaggaccacaccagtgcctgatttctacttagggagagaggattggaaacgatccctaagaaactgactgagggtgagaatggccaggaggtgtgtgtccaaataaccaggagggggcacagaagatgatggcaaggcagactgggcagtgttttgtagacacagaacaaagaatcagaatttgaaaaaagaagaaaaacaaatcttcgcagctgcaactttaaagtatcacctttatagatggcagggatttccattatgcaaatggaatctaagatttcaatgtgaaatcttagaatgcagttttaccacttgcagtcttgtatttgtggtggccatgtggtgagggcggtgatgctgagctttctgcccaggaggaatgagctttcaagctctcagcagggtgtcaggcttggggatttgagcatccactgctcaaagtccaggctattctccagtcctcacggcagccactaagcccaggagccagacctggcccggggacacatctcctgagggatcccagaaagaacccagtctttcctttcccttggggtccttgttagaatgaaaacctctctatttaaggcacatcattcccagctaggtttatacacttgtctatattttactggaggaaagggaattaaaaaagaactctgcagttcaaggccctttcatttaaccttccaaaaacagcaaactcattttaaagactcattgctgaggtgatagagagaaaccttatcctctccaaccttcacattcacaaaaaccatccttgtgtacttgactgccctagacagtggtgactcttaggtttcattacgaatgtggaatatcagagtgtgggaaggcccaggcgagggccaatgttgtgtttcttaccccctctggaatgccaaaggcaaggtactaggtgacctcctggtccccaagaaaatgtgatttattctgagggcgaacagccaagggaggactagtctggagcacgctcggccgtcctggcaggagctgagcctcaggtgtctggcggtgccccagcagccctggattcacccaacaccagaatcccacttttctaaatccacctgttgttctgagcacctctgaacccgcagcttcggcaaaaggagtctgtaccaagctgcttctggatgaccaacactggagactctggccttaccatgtggaaatcattttcctgaagtctggaactaattttgagaagtttttttctcaacacttttgtgtttctaacactgtatcttgactgtgtaaataccaacaaggctgtaaataaatgcagatgtagataccttctagaaaaaaaaaagcataaaaacaaaaccagaagtgatcccgtgtagccttcgttgacaaataaagactattttgtgttt

SEQ ID NO: 18289 - DNA, 3082 bp, Homo sapiens
  CDS (83)..(1864)
atttggagtcaggcctggctgttgctcaggtgaccagcttgtgtctctgggagggcgctgctttccccggccacccggcgcgatgatccagaatgtcggaaatcacctgcgacggggcttggcctctgtgttctccaaccgcacatcccggaagtcagccttacgtgcggggaacgacagtgccatggcagacggcgagggataccggaaccccacggaggtgcagatgagccagctggtgctgccctgccacaccaaccaacgtggtgagctgagcgtcgggcagctgctcaagtggattgacaccacggcttgcctgtccgcggagaggcacgctggctgcccctgtgtcacagcttccatggatgacatctattttgagcacaccattagtgttggacaagtggtgaatatcaaggccaaggtgaaccgggccttcaactccagcatggaggtgggcatccaggtggcctcggaggacctgtgctctgagaagcagtggaatgtgtgcaaggccttggccaccttcgtggcccgccgagagatcaccaaggtgaagctgaagcagatcacgccgcggacagaagaggagaagatggagcacagtgtggcggctgagcgccggcgcatgcgccttgtctatgcagacaccatcaaggacctcctggccaactgcgccattcagggcgatctggagagcagagactgtagccgcatggtgccggctgagaagacccgtgtggagagtgtggagctggtcctgcctccccacgccaatcaccagggcaacacctttgggggccagatcatggcctggatggagaatgtggccaccattgcagccagccggctctgccgtgcccaccctacgctgaaggccattgaaatgttccacttccgaggcccgtcccaggtcggcgaccgtctggtgctcaaagccatcgtgaacaatgccttcaaacatagcatggaggtgggcgtgtgcgtggaggcctatcgccaggaggctgagacccaccggcgccacatcaacagtgcctttatgacctttgtggtcctggacgcagatgaccagccccagttgctgccctggattcggccccagcccggcgatggtgagcggcggtaccgagaggccagtgccagaaagaagatccgcctggacaggaagtacatcgtgtcctgtaagcagacagaggtgcccctctccgtcccctgggaccctagcaaccaggtgtacctgagctacaataacgtctcctccttgaagatgcttgtggccaaggacaactgggtgctgtcctcggagatcagtcaggtccgcctgtacactctggaggatgacaagttcctctccttccacatggagatggtggtgcatgtggatgcagcccaggccttcctgctgctctcggacctgcgtcagaggccagagtgggacaagcactaccggagcgtggagctagtgcagcaggtagacgaggacgacgccatctaccacgtcaccagccctgccctcggaggtcacacaaagccccaggacttcgtgatcctggcctcaaggcggaagccttgtgacaatggggacccctatgtcatcgcgctgaggtcggtcacgctgcccacacaccgagagacgccagagtacagacgcggagagaccctctgctcaggcttctgcctctggcgcgagggggaccagctgaccaaggtatcctactacaaccaggccaccccaggtgttctcaactatgtgaccaccaacgtggccggcctctcctctgagttctacaccaccttcaaggcttgtgagcagtttctcttggacaaccggaatgatctggcccccagcctccagaccctctagatgccctcagtggccacatcatgcccactcccactccatcctgtccccaaggactcacatacagtgcctggagaaagccaaagacctttatttcttcctgcctccccgtgggaagcctccgccctgaggtccgctggcccaccacccctgggtgctcagtttctaccaacatgagccagcaagtccttgtggtagccctggggtagcctgtagtagactcgggtcctgtccacagccctagctgccagcaatgctgtcctcacagaggcatagtcgcccccagctgggttgtgctccactgtgacggtggcccggggggaggatgccagcagcctggctatggctccagctgtgctgtggcccagcagcatggcctgcatctggaaggacacaggttgccagagcccctggcacaactctagcatatctgtgagcagctgttccctgtagccactgcccagcacctcctcaggccagcctggtgccacagtcacgtgggggaagacctcagccacagctgtaagcagctctctgccagccacatggccggggaccaaaaaactcccgtgggagattttggccccaacccacacaggccaatgcaagaggccaaggctggagaggcgtgccagcaaggccagggatggccggagggctgcgggctccgctatttgcaaatggatgccccagtgtccgggatgtgtggccagctgctgcaggcaggactccagcgtcaggatgttgccacttggagtatgaacaatgggcacggggttttcagccacagttccctcgaggccagtgttcagcaggatcatgccttctgtgtctggaagaggcggcagaggcaacagtgtttaggatttgggttatcataaggtgttaagagtcccttgttaaaggggcagtgggagttatggggtcatcaaggaccttgcctctctggaatctgtcaacccagttttgggctccaggtggatgggttgctttataaatgtgcctggtgcatgagaaactcttgtttcagctcttggcctttacccatgactcagcctgggggctggtgccggccttgcctgcagcaatgtagctgaggactggtctgaaggccaggagccctgtgctcttgacatcactgtactccctctccctccccgcaaccctgccccaccttgcatccagggtatggtgtaaataaacctgtgttgccatggc

SEQ ID NO: 18290 - protein, 594 aa, Homo sapiens
MIQNVGNHLRRGLASVFSNRTSRKSALRAGNDSAMADGEGYRNPTEVQMSQLVLPCHTNQRGELSVGQLLKWIDTTACLSAERHAGCPCVTASMDDIYFEHTISVGQVVNIKAKVNRAFNSSMEVGIQVASEDLCSEKQWNVCKALATFVARREITKVKLKQITPRTEEEKMEHSVAAERRRMRLVYADTIKDLLANCAIQGDLESRDCSRMVPAEKTRVESVELVLPPHANHQGNTFGGQIMAWMENVATIAASRLCRAHPTLKAIEMFHFRGPSQVGDRLVLKAIVNNAFKHSMEVGVCVEAYRQEAETHRRHINSAFMTFVVLDADDQPQLLPWIRPQPGDGERRYREASARKKIRLDRKYIVSCKQTEVPLSVPWDPSNQVYLSYNNVSSLKMLVAKDNWVLSSEISQVRLYTLEDDKFLSFHMEMVVHVDAAQAFLLLSDLRQRPEWDKHYRSVELVQQVDEDDAIYHVTSPALGGHTKPQDFVILASRRKPCDNGDPYVIALRSVTLPTHRETPEYRRGETLCSGFCLWREGDQLTKVSYYNQATPGVLNYVTTNVAGLSSEFYTTFKACEQFLLDNRNDLAPSLQTL

SEQ ID NO: 18291 - DNA, 3065 bp, Homo sapiens
  CDS (2447)..(2809)
ttaccggctttacttcactgcagaatctgactgcggtcagatctatatgacagattgttgtattcgttttctgcgggtacgtcactatccagtctactttttccattgacgtggctgagtcatatgtagtatgactgtcagagacgttggaacctgaagcgaccccattttgagtgagggctagaaaaatgaggccgggacttacgggcctgcattctcagaaggatattcctagctttcagatgcttacggttaagggaacaaattaatgtttactgaagagacccgagcgtccagatagctggatatctggagaacaaaggcgttcctaattttgctttaaaggtagtaatagggattcttgcaaaatgtaataattaaagttaattctttatcacaaacccttgtagcagagcacctctccccatgtatacaagcattgtacctagggtggatacgttccttctcttagtttcgggaacgcccttctctgtctatggagtagctgttctttcaccactttactttcttgataaacttgcttttattttgcaccgcggactcgccctgagttatttcttgcgcgagacccaagaaccctctctttgggtctggatcggggcccttttcctgtgacgtatttctggccaccacagatgggactatagtgctttggggaagtgttggggtcctataacatatttctggcgaacgacggaaggggcgatactgaagaaactcccccaacccaaaggaagtagactgcagcactgattggacgactttgggtaagtggtggagtgcccgggtaaagaatgggattgggttagaggcccaacttaatggagttagagtctttcctaaaagagagtgggttagaggcccctcttaataaaaggcaaggacacttgaccgacctcgggttagaggcccgaccgaggagggttagaggcccctcccagtaaagcccctctcggctaaaaaacaggtttgacaccgcaggctatgctctttgtattagtctgcctcgtcctccttgtcttggttgctgtctccgtttcagtgtcattttcaggagacttcatttaactggtcttagggattttaactgattcttctcctatgtccctcccgatttctgtccgtttgcttgtgaaacactgggaaccaaaagcattggaggatccggctctaaaattgctgattgagatttgatatttaacagctatgagcagtaagattcgatagatgtggttgtgttttgttgctgctgtgctgagtgtgattgagaagcactaggatggaaatcaggggacttttctccttgctgttttgtttggttttgcacactaaaaaaactcctttgtagctaagtgcggtggctcacacctgtaatcccagcactttgggaggccgaggcaggcagatcacctgaaatcaggagttcgagaccatcctggccaacgtgttgaaaccccgtctctactaaaaatacaaacattacccgggtgtggtggcagacatctgtaatcccagcttcttgggatgctgagtcaggagaatcgctttaatctaggagtcagagtttgcagttagctgagattgcaccactgcactccagcagtcttctcaacagagcgagactctgtctcaaaagaaaataaaaaaactttcttttcttggattcgggcaaaccgtgtttgctttgcttttccaatcctcactgctgttattggttactctggttgttcccatctaaatcctcttcacttattttgccttattcgacatttttttcaaagtccatgttgtggtttatctaagattcatagctcagctcacttatgttatttggataatgtgaatcatgtttgatgagaggaaaagaagaaaaagatttagacatactaggtgatcctttaatgcaagccctgctgtggttcagcaggcatttttgggtggagcggaacccctttctgtcagctctgaaggttcgtatgtgtcagttctttctccctgtagtccacctgaaagttcttgagaacccttcgtcccttctccttacccagctagtcccactctgtacccaccattcccacaaagaacttagcccaccgagtactacttatagtgcagcctgctatcaacctccaaagggaaatctttgtccacttaggtggcaaatcgggaagagggcactgtgagagtacatgttcccttttctccgtctggtttgaccctatatatagagaaggttggtcatttctctgaagatccaggaaaatttatagatgagtttgagaaatcaactctgacctatagtttaacttgggaggatctgcatgttttgttgtctctgtgttgtacagtggaggagaaacaatgcattttggggacagctaggacccatgcagatgaggtattggctcgcaacccgtaccatactatgtatcaggcaggaagtatagcagttccagatcaagatgcagagtggaattatcaaaggcgcagtgaggacttggggaggagagatcatatggtcacttgttcgttggaagggatgaagaaatgtatgaaaaagcctgttatctatgaacaggttaaggaagattctcaggataaagatgagaatccaggtttgtttcaagggcatttagttgaagcaatcgggaagtataatatcactgatcctgcctcaaaggagagacaaacccttttgggaggacattttatgacccagtctgcccctgatatccccagaaaactacaaaaagcagctatgggagccgggcgtggtggctcaagcctgtaatcccagcactttgggaggctgaggggggtggatcacttgaggtcaggagttcaagaccagcctggccagcatggtgaaaccccttctctactaaaaatacaaaaattagctggggatggtgacaagtgcctgtaatctcacctacttgggaggctgaggcaggagaattgcttgaacccatgaggtggaagttgcagtgagcccagatcacgctattgcactccagcctgggtgacagagcgagactgtgtct

SEQ ID NO: 18292 - protein, 121 aa, Homo sapiens
MYQAGSIAVPDQDAEWNYQRRSEDLGRRDHMVTCSLEGMKKCMKKPVIYEQVKEDSQDKDENPGLFQGHLVEAIGKYNITDPASKERQTLLGGHFMTQSAPDIPRKLQKAAMGAGRGGSSL

SEQ ID NO: 18293 - DNA, 2976 bp, Homo sapiens
  CDS (79)..(2148)
gtgctgtttttgttgttggtgaaaggtgaggggaacagctgatccgtctgttgggaggacagatatctcaaggccaggatggaagaatcaccactaagccgggcaccatcccgtggtggagtcaactttctcaatgtagcccggacctacatccccaacaccaaggtggaatgtcactacacccttcccccaggcaccatgcccagtgccagtgactggattggcatcttcaaggtggaggctgcctgtgttcgggattaccacacatttgtgtggtcttccgtgcctgaaagtacaactgatggttcccccattcacaccagtgtccagttccaagccagctacctgcccaaaccaggagctcagctctaccagttccgatatgtgaaccgccagggccaggtgtgtgggcagagcccccctttccagttccgagagccaaggcccatggatgaactggtgaccctggaggaggctgatgggggctctgacatcctgctggttgtccccaaggcaactgtgttacagaaccagctcgatgagagccagcaagaacggaatgacctgatgcagctgaagctacagctggagggacaggtgacagagctgaggagccgagtgcaggagctcgagagggctctggcaactgccaggcaggagcacacggagctgatggaacagtacaaggggatttcccggtcccatggggagatcacagaagagagggacatcctgagccggcaacagggagaccatgtggcacgcatcctggagctagaggatgacatccagaccatcagtgagaaagtgctgacgaaggaagtggagctggacaggcttagagacacagtgaaggccctgactcgggaacaagagaagctccttgggcaactgaaagaagtacaagcagacaaggagcaaagtgaggctgagctccaagtggcacaacaggagaaccatcacttaaatttggacctgaaggaggcgaagagctggcaagaggagcagagtgctcaggctcagcgactgaaagacaaggtggcccagatgaaggacaccctaggccaggcccagcagcgggtggccgagctggagcccttgaaggagcagcttcgaggggcccaggagcttgcagcctcaagccagcagaaagccacccttcttggggaggagttggccagcgcagcagcagccagggaccgcaccatagccgaactacaccgcagccgcctggaagtggctgaagttaacggcaagctggctgagctcggtttgcacttgaaggaagaaaaatgccaatggagcaaggagcgggcagggctgctgcagagtgtggaggcagagaaggacaagatcctgaagctgagtgcagagatacttcgattggagaaggcagttcaggaggagaggacccaaaaccaagtgttcaagactgagctggcccgggagaaggattctagcctggtacagttgtcagaaagtaagcgggagctgacagagctgcggtcagccctgcgtgtgctccagaaggaaaaggagcagttacaggaggagaaacaggaattgctagagtacatgagaaagctagaggcccgcctggagaaggtggcagatgagaagtggaatgaggatgccaccacagaggatgaggaggccgctgtggggctgagctgcccggcagctctgacagactcagaggacgagtccccagaagacatgaggctcccaccctatggcctttgtgagcgtggagacccaggctcctctcctgctgggcctcgagaggcttctccccttgttgtcatcagccagccggctcccatttctcctcacctctctgggccagctgaggacagtagctctgactcggctgaagatgagaagtcagtcctgatggcagctgtgcagagtgggggtgaggaggccaacttactgcttcctgaactgggcagtgccttctatgacatggccagtggctttacagtgggtaccctgtcagaaaccagcactgggggccctgccacccccacatggaaggagtgtcctatctgtaaggagcgctttcctgctgagagtgacaaggatgccctggaggaccacatggatggacacttctttttcagcacccaggaccccttcacctttgagtgatcttactccctcgtacatgcacaaatacacactcatgcacacacacactcacacacatgcatacacttaggtttcatgcccattttctatcacactgggctccatgatattctgttccctaagaactgcttctgtgtgccctgttttcatcccaagatttctcacttcatcctctcctacctggctcttttgtcccagggaggggtcctgttcggaagcagtggctgaatttatcccctgaaagtggttttggaggaaccgggatggaggaggccttcccctgtgggaatagaatcgtccactcctagccctggttgcttctgatacacagccactgcacacacacactcacactcacactcccttgtctgatgccccaaagccaattcctggggcaccctaccctctcttatttggagtttccgttggtttacctgagttttctctggggtctgcacagaggcagcagcatggacatcatggcctctcaggtcccttttggttctcagtttcattggttcctctttctgttcccccattgacttctgtgccccaccctagccttttccataaccttaggtattcagtttggaggggttttttgtatttttgaggattcctgtattctgtatcctctcctcgcatctcctcacatggaaagaaataatgtatttgtgccttctgtgaggaatggggggaacaagtggtcccaggtatccccatttccaaggcccccctccctctccaggtccccccacagcaataaaagcttccccctgatatccatccctttgtagtttgaacaaatatatttatatgatatgt

SEQ ID NO: 18294 - protein, 690 aa, Homo sapiens [sequence omitted]

SEQ ID NO: 18295 - DNA, 2533 bp, Homo sapiens
  CDS (534)..(1064)
gtttaggcccaaagtggtgtcggagcagcgcctattagtgtcatcctcaccgtcacggccggcgcctcctcctggattcattcacccgctcttttcattcacgaaggtagtgaggcctagtggaaagccatggagagcgctctccccgccgccggcttcctgtactgggtcggcgcgggcaccgtggcctacctagccctgcgtatttcgtactcgctcttcacggccctccgggtctggggagtggggaatgaggcgggggtcggcccggggctcggagaatgggcagttgtcacaggtagtactgatggaattggaaaatcatatgcagaagagttagcaaagcatggaatgaaggttgtccttatcagcagatcaaaggataaacttgaccaggtttccgtgaaataaaagaaaaattcaaagtggagacaagaaccattgctgttgactttgcatcagaagatatttatgataaaattaaaacaggcttggctggtcttgaaatcggcatcttagtgaacaacgtgggaatgtcgtatgagtatcctgaatactttttggatgttcctgacttggacaatgtgatcaagaaaatgataaatattaatattctttctgtttgtaagatgacacaattggtactgcctggcatggtggaaagatccaaaggggctattctgaacatttcatctggcagtggcatgctccctgtcccactcttgaccatctattctgcaaccaagacttttgtagatttcttctctcagtgcctccatgaggagtataggagcaagggcgtctttgtgcagagtgtcctgccatacttcgtagctacaaaactggctaaaatccggaagccaactttggataagccctctccggagacgtttgtgaagtctgcaattaaaacagtcggcctgcaatcccgaaccaatggatacctgatccatgctcttatgggcttgataatctcaaacctgccttcttggatttatttgaaaatagtcatgaatatgaacaagtctacacgggctcactatctgaagaaaaccaagaagaactaagcattgataactgcattgtaacttggccagatgctccagcatatgcacgttcactgcaaagcaccctactggttttgaaaatctgaccttgtcatttcaatagttattaacatgactaaatattatcttaattaagaggaaaatagaagttgcttttaggggtttctgacatatattctggatactatccgaggtaattttgaagtttaatataaatgctcatatcaaatgaatatagaactaatattgtcgggaacacctaatagaaaggaatactattatagcaaatcacagaatgatagactcaagcataaaacttggcagttttatctgcttcaaaatgccattgatcattattcctgtattttctctgaaactgattataaaaaccaatgtccagctactcttttgacacttgaagaaatggagatcgatttgatttgtttataagcagacacactgcaatttacaaagatctctttacggttttataaaattatcttccagtttgtacatttatatggaattgttctttatcaagggtagctaatgacatgaaaataattgtgaaatatggaattatttctgacacatgaagcccactaaactatgctttcttataatgcatatttcttctcagtttattttttattttattttttttttttttgagacggagtctcgctctgtcgcccaggctggagtgcagtggcgggatctcggctcactgcaagctccgcctcccgggttcacgccattctcctgcctcagcctcccaagtagctgggactacaggcacccgccactacgcccggctaattttttgtatttttagtagagacggggtttcaccgttttagccgggatggtctcgatctcctgacctcgtgatccgcccgcctcggcctcccaaagtgctgggattacaggcgtgagccaccgcgcccggccctcagtttaaatgtatgtaaatatcgaagctatatggtatgatttataaagataaatgggccaaagtgtacattgagactggcagccatctatggtaccactgaaaccctgacccagaaaagtggcttgcttggacacccagctgcctttgtttctgcattaaaccaatattgatcacacatatgacacaggctagtcctataaaagtaatgacttcatagaaatggcattataatttttaagttgatactctacaggtagctattgatataattagttttaataaaacatgctgcaaccatggtatacaacaaaaatacatttctttggtgattgaaattaaggccgtatttacaatgacttaatataagactgacttttatcctgcttcataacttgtatggagaactcaccaagaaagaattcaatactgtgaaatatgcagcaagaagattggtctttacctaggctgtgtttcctaagctctgagttttaagcaccagtagatttgtatt

SEQ ID NO: 18296 - protein, 177 aa, Homo sapiens
MSYEYPEYFLDVPDLDNVIKKMININILSVCKMTQLVLPGMVERSKGAILNISSGSGMLPVPLLTIYSATKTFVDFFSQCLHEEYRSKGVFVQSVLPYFVATKLAKIRKPTLDKPSPETFVKSAIKTVGLQSRTNGYLIHALMGLIISNLPSWIYLKIVMNMNKSTRAHYLKKTKKN

SEQ ID NO: 18297 - DNA, 1954 bp, Homo sapiens
agacatacagaaaagtgcacataagtggacagctccatggatttcacaaagggagcacagtcacataatcagcatccaggtcgggaaacagcataaccagcaaagccccctgagcctcctaccagttaccacccagtcccctcccaaggtagccaacatcctcgcatccagatggctttcactctccctggttacaaactgcttttcttaacaagcttttttttttttttttttttgagacagagtcttgctctgtcatccaggctagagtgcagtggcccaatcggctcactgcaacctccgcctccggggttcaagtgattctcctgtcttaggctcccgcctgtaatcccagcactttgggaggccgaggcgggtggatcacttgaggtcagagaccagtctggccaacatggtgaaaccctctctgctgggagtacaagaattagccgggcatggtggcacgtgcctgtaatcccagctactcggggctgaggcaggagagtcgcttgaacccaggaggtggaggttgcagtgagctgagatcgcgccactgcactgcagcctgggcgacagagggagaccctgtctcaaaaaaaaaaaaagaatgaggtttttttctttgtgatctaccatatggaaaggtttgtatatattttatggcattgtttgggaaaaatgcaaactgtgtgcttcctatgctctcacatcaccacaatcatgaccacagaagagttctgtgaccaaatgtgttgggtttcttccccacacaccaagcagcagacacccgctgggtgtcctctgatttaattccaacactatttacccagagatagcatcagattccatgagttgagggctgagtccccaagcctgcctcccttcaggcactagttcagtcccaaatctgcctccccactttcaggcactagctgcaggtcagggcctcaggcctccagaatttctgaccaactggctccaggtaggggtttccataactccctctttgggctcagtttgctggagtggctcacagagctcaggataacacatttaccagtttattacaaaggatgttacaaagggtacagatgagcaggtgcatagggcgaggtgtaggagaaggagcatggagtttccatgccctccccgggcgtgccaccctccaggagcctccagagctgagatcgcgccactgcactccagcctgggtgacagagtgagactctttctcaaacaaaacaaaaccaaaatatctcctgttacagatacacatttctgtcttatcctcttcgcctttctttatgaacattgttggtatgttcaatggaattagggaaattagttgggaaatgttggcagttgttggacaagagatgatagtggcttacaaagaaaatgttgcaggtagaccttccatgacttggtaatggattgattactaggtatattaatccaggttcatactgctgtaaagaactgcccgagactaggtaacttataaaggaaagaggtttaattgactcacagttcacagcatggctggggaggcctcaggaaacttacaatcatggcagaaggtgaaagagaagcaaggcatcttcttcacaaggcagcaggaaggagaagtgttaagcgaagcagggagagccccttataaaaccatcagacctcgtcgggtgcggtggctcatgcctgtaatcccagcactttgggaggccaaggtgggcggatcatgaggtcaggagatcaagaccatcctggctaacatggtgaaactccatctctactaaaaatacaaaaaattagctgggtgtggtggcaggcacctgtagtcccagctacttgggaggctgaggcaggagaatggtgtgaacctgggaattggagtttgcagtgagcagaggtcgtgccactgcactccagtctgggcgacagagcgagactcagtctc

SEQ ID NO: 18298 - DNA, 2448 bp, Homo sapiens
  CDS (62)..(1696)
gaccgtggatcggctggagcggggccgccgccggctgcagcaggagctggacgacgccaccatggacctggagcagcagcggcagcttgtgagcaccctggagaagaagcagcgcaagtttgaccagcttctggcagaggagaaggcagctgtacttcgggcagtggaggaacgtgagcgggccgaggcagagggccgggagcgtgaggctcgggccctgtcactgacacgggcactggaggaggagcaggaggcacgtgaggagctggagcggcagaaccgggccctgcgggctgagctggaggcactgctgagcagcaaggatgacgtcggcaagagcgtgcatgagctggaacgagcctgccgggtagcagaacaggcagccaatgatctgcgagcacaggtgacagaactggaggatgagctgacagcggccgaggatgccaagctgcgtctggaggtgactgtgcaggctctcaagactcagcatgagcgtgacctgcagggccgtgatgaggctggtgaagagaggcggaggcagctggccaagcagctgagagatgcagaggtggagcgggatgaggagcggaagcagcgcactctggccgtggctgcccgcaagaagctggagggagagctggaggagctgaaggctcagatggcctctgccggccagggcaaggaggaggcggtgaagcagcttcgcaagatgcaggcccagatgaaggagctatggcgggaggtggaggagacacgcacctcccgggaggagatcttctcccagaatcgggaaagtgaaaagcgcctcaagggcctggaggctgaggtgctgcggctgcaggaggaactggccgcctcggaccgtgctcggcggcaggcccagcaggaccgggatgagatggcagatgaggtggccaatggtaaccttagcaaggcagccattctggaggagaagcgtcagctggaggggcgcctggggcagttggaggaagagctggaggaggagcagagcaactcagagctgctcaatgaccgctaccgcaagctgctcctgcaggtagagtcactgaccacagagctgtcagctgagcgcagtttctcagccaaggcagagagcgggcggcagcagctggaacggcagatccaggagctacggggacgcctgggtgaggaggatgctggggcccgtgcccgccacaagatgaccattgctgcccttgagtctaagttggcccaggctgaggagcagctagagcaagagaccagagagcgcatcctctctggaaagctggtgcgcagagctgagaagcggcttaaagaggtggtgctccaggtggaggaggagcggagggtggctgaccagctccgggaccagctggagaagggaaaccttcgagtcaagcagctgaagcggcagctggaggaggccgaggaggaggcatcccgggctcaggccggccgccggaggctgcagcgtgagctggaagatgtcacagagtcggccgagtccatgaaccgtgaagtgaccacactgaggaaccggcttcgacgcggccccctcaccttcaccacccgcacggtgcgccaggtcttccgactagaggagggcgtggcatccgacgaggaggcagaggaagcacagcctgggtctgggccatccccggagcctgaggggtccccaccagcccacccccagtgaccctaccctgtccccagatgcactaacagatggggcccagcccccttcctccctggaccccacgggcccctgtcccaggaaccccgccctctgacttcttgccctttggaaatggtgcagcactctggcatttatcacccccacctgggtcccctgcaacctcccatcaaaggatgacccctaaacacagaggagcggggcaggcagggaggcaaggactggagctaccttgcttgttgggggactgggtacagttggcaagctgtgtttccatcagctccctgtcctcctttcttcccccgttattgatctatagacattaggaagggagtgggacggctcctccaccatcctcagccagtgcaacccattccctctgcttctctctctctctctctctctccctccctctccttccctaccctctcaccatctttcttggcctctctgagggtctctctgtgcatctttttaggaatctcgctctcactctctacgtagccactctccttcccccatttctgcgtccacccctgaactcctgagcgacagaagccccaggcctccaccagccttgaacccttgcaaaggggcaggacaaggggacccctctcactcctgctgctgcccatgctctgccctcccttctggttgctctgagggttcggagcttccctctgggactaaaggagtgtcctttaccctcccagcctccaggctctggcagaaataaactccaacccgactgg

SEQ ID NO: 18299 - protein, 545 aa, Homo sapiens
MDLEQQRQLVSTLEKKQRKFDQLLAEEKAAVLRAVEERERAEAEGREREARALSLTRALEEEQEAREELERQNRALRAELEALLSSKDDVGKSVHELERACRVAEQAANDLRAQVTELEDELTAAEDAKLRLEVTVQALKTQHERDLQGRDEAGEERRRQLAKQLRDAEVERDEERKQRTLAVAARKKLEGELEELKAQMASAGQGKEEAVKQLRKMQAQMKELWREVEETRTSREEIFSQNRESEKRLKGLEAEVLRLQEELAASDRARRQAQQDRDEMADEVANGNLSKAAILEEKRQLEGRLGQLEEELEEEQSNSELLNDRYRKLLLQVESLTTELSAERSFSAKAESGRQQLERQIQELRGRLGEEDAGARARHKMTIAALESKLAQAEEQLEQETRERILSGKLVRRAEKRLKEVVLQVEEERRVADQLRDQLEKGNLRVKQLKRQLEEAEEEASRAQAGRRRLQRELEDVTESAESMNREVTTLRNRLRRGPLTFTTRTVRQVFRLEEGVASDEEAEEAQPGSGPSPEPEGSPPAHPQ

SEQ ID NO: 18300 - DNA, 2446 bp, Homo sapiens
  CDS (906)..(1274)
agttaaagcagcgttcagagggaaatgtttagctgtaagcatctacctttaaaaataagaaagccagcagtggtggctcatgccaacatcccagtattttgggaggctgaagcgggaggatcccctgaggtcaggagttcaagaccagtctaaccaacatggcaaaagcccatcgctactaaaaatacaaaaattagccaggcatggtgatgcaggcctgtaatcccagctacttgggaggctggggcaggagaatcgcttgaacctgggagagggaggttgcagtgagccgagatagcaccactgcattccagcctgggtgacagagtgagactcttatctcaaaaaaaatcaataaaaataaaaaataaaagtaagaaagatctcaaattagtcacctcactataccctctaaaggatctagaaaaagaagagctaaccccaacctagcagaataccagaaacaaagattagagtggaaataaataaaggaaattaagagaatagataaaattaaaagttttttttacagttcagcaaaattgacaaatttttagctagattgactaagaaacacaagaagactcaaatatccaaaatcagaaatgaaaatgaggccattactgtgactttacaacaattaaggttatcgtaagagaatactataaacatatgtacaccagcaaattgaataaccaaatgaaatggcaaatctctagaaacacaaacctaccaagactgaatcacaaagaaataaaaaatatgggtaaaccaaccaggtgcagtggctcgtgcctgtaatcccagcactttgggaggccaaggtaggcggatcacctgagatcaggagttcaagaccagcctggccaacatggtgaaaccccttctctactaaaaatacaaaaatgagctgggtgtggtggcaggcgcctgcagtcacagcaactcgggaggctgaggcaggagaatcacttgaactgggaggcggaagttgcagtgagctgagatcgcaccattgtgctccagcctgggggacaagagtgagacttcgtctccaaaaaaaaaaaaaaaaagaaaaagaaaatatgggtaaacgtataactagtaagaagattaaattaccaataaaatcttcccaacacagaaatacccttgactggatggctccaccagtgaattctaccagacatttaaaggaaaaattagtgccaatcctttgcaaactctttcaaaaacttgaagaggaggaaatactttcttttttttgtttgttttgagacagagtctcgctctgtcgcccacgctggggtgcagtggcgcgatcttggctcactgcaagctctggctcccgggttcgcgccgttctcctgcctcagcctcccgagtggctgggactacaggcgcccaccacaacgcccggctgattttttgtatttttggcggagacggggtttcactgtgttggccaggatgatctctatctcctgacctcgtgatccgcctgccttggccttccaaagtgctgggattacaggcatgagccacccggtgcccggccgagaaggaaacactaactcattctatgaggacagcattgccttgttactagggccagacaaagacagtacaagaaaacaactgaccaatattgcttatgaacattgattaaaaaattctcaagaagacactgcctgctgggtgtggtggctcacgcctgtaatcccagcactttgggaggccaaggtgggtggatcacgaggtcaggagtttgagaccagcctggtcaagatggtgaaactctgtctctactaaaaatagggaaaattagctaggcatggtggtgggtgcctgtaaccccagctgcttgggaggctgtggcaggggaatcgcttgaacacgggaggcggaggtggctgtgagccgacattgcgccactgcactccagcctgggcaacagagtgagactccatctcaaaaaaaaaaaaaagaaaaaagaaaaaaaagaaaacactgcccaactggctggccgcagtggctcaggcgggtaatcccagcactttgggaggccaaggcaggtggatcacttgagttcaggagttcaagaccagcctggggaacgtagtgaggccccacctctacctagaatacaaaaatcagctggttgtggtgttaccctcctgtggttccagctgcttgggaggctgaggtgggaggatcactggaaccaggaagttgaggctgcagtgagccgagattgcaccactgcataccggcctgcacgacagagtgagactccatctcaaaaaaaaataaataaataaaaataaaaaataaaagaaagatctcaaatcagtcacctaactatacactttaaaggacctacaaaaagaagaactaaacccaagctagcagaataggggaaacaaagattagagtggaaataaat

SEQ ID NO: 18301 - protein, 123 aa, Homo sapiens [sequence omitted]

SEQ ID NO: 18302 - DNA, 2792 bp, Homo sapiens
gagttcgacgttctctggaggcttgggagatgcagccagggcgcagagttggcagtggctgcagacatctcttttcaatgtggacctcctgccacagccacgagattcaaggattttctaggaaaatgaacgccagtggatgtgtggaattttttcacaaagtaagtgacgggggtccctttgcacttctcatgcccccatggttaattgtgtgtgtgtgctggaagtggaggagggcggtgggtggtgcagctgtttgaggactcacccttcttcggaaggctggggtcaatggggtgctgtttccccgagtcagttgaaacgcccatggctaaagcctgtggatcatctcacccctgcatttcctatttggctctcactttggtcgaaagacagcggagcgcagaaaatctgtcataattgtgaaagtaggacctgtcatcctctaagggtcattcttcctggcccaccgggcttgttgacacctggagttgggtagcagagagagggatgtcgggaccgtgaattaacagtggccaccacttcatggtgaatggcatccagacaacaccttcacctgtctggggaagaacataggctaggcctgggagaggctgtctactgaagtccctgcaggggtccaggctggactatacccctccagcttggcgagagagccaaggaccagcaagggaagtgatgtacgctgagaaccgtccgggcgcccagcacgggtcagggcctttggcttacaggctgtgtttatttctgagcagccctatgcagttggcattagcatcctaccgttcccactagccagctgggactcaaaccgattaagtaactgtctacctgcttcctgtgttctgtgtctgttggtgttgattaaaaaatataaaaggccaggttcatgcctgtagtcccagcactttgggtggccgagacaggaagatcacttgagcccaggagttcaagaccagcctggggcaacatagcgagacctgcatctctatttttttttttttttttttgagacagagtctcgctctgttgcccaggctggagtgcagtggtgcgatctcaactgactgcaacctccgcctcccgggttcaagcaattatctgcctcggcctcctgagtagctgggattacaggcgcccgcgccacgcctggctaatttttgtatttttattagagacggggtttcactgtgttggccaggctggtcttgtactcctgaccttgtgatccacctgccttggcctcccaaattgctgggattccaggcatgagccactgtacccggcctcaaaatattttttaacagaagtagcagggtgtggtgatgcctgtagttgcagctactcgggaggctgaggtgggaggatcacttgagactgggaggttgaggctacagtgagctgtgaccgcgctactgcactccagcctggatgacagagtgagaccctgtctcaaagcaaacacacacacaaaaagtaaaatccctgtgattatatttttgctagtacttgctaagctgtagctgcttcaatttgagagcagagcctgggctgcccaaagaaagtcctgaccccttaactcagaactccgtcagcagaggaattgggttctctgggctgttctctactcaggcacacccttgctgggcctcccatgccccagggcagtccaggaaatagtgtgtgcatggtggaggggaaggaccttgactgagaccagacagggttggaatcttgggtctcctacttcctgtctctgtgaccttggccaaccatttaacctcacttgaggaaattgagcctcagtttcctcatctgtaaagtggggttgttatgacgataagacaggataaaacacatgaaacagccagcattttaccacttttaacctacagaacggcagtttgacatggctcactcaagtatgtccatcatggagatgcctcagtgaggtgctgggacatggtagactcagtaatgttcccttcctctcctccagccctcagtgttgaaggctttgtcatcctgaatggcgacgaatgggaagtgagctctgaaactgaaaccaccatttggggacaaaagctggcattgtagttgtggctctctgggaaggtctcatctgtcttctcggggctgttccctaaagctgtcattacgctggctttgcggcaggggtgcagcagcagtgggtggtgatgcggctgctcttgagtggcctggtggggtcatttcagtttcaaggccttggagagtgtgcttagcaggtggggcctaagatttgcatttcagctgcccaggtagtcaagaagcggtatagcaaagcggctgtgagcccattctctggagtcctgctggctgggtttgaaccccaggtctgcctcttgcctgctggtgcactcagccaagttacttcatctgtctgcctcgatttcttcatctctagtggtttctacctcagagactctgggagccacaaacaggatcccacttcttgaacaatgcctagaacaaataagcaatttctatgctgtagagagtgtttgcttacttaaaataatgcttattaaaaattggcgggtgcagtggctcatacctttaatcccagcactttgggaagccaaggtaggaggatcatttgagcccaggagttcaagaccagcttgggcaagatagtgagaccccatctctcagagagagagagagggagggagggaggaagggggagagagagagagagagagagagagagagagaagatagaaagaaag

SEQ ID NO: 18303 - DNA, 2276 bp, Homo sapiens
  CDS (190)..(792)
aaacagtttgatgatggtggctctgatgaggaagatatatgggaggaaaagcacatcgcattcacaccagaatcccaaagacgatccagctcggggagtacagacagtgaggaaagtacagactctgaagaagaagatggagcaaagcaagacttgtttgaacccagcagtgccaacacggaggataaaatggaggtggacctgagtgaaccacccaactggtcagctaactttgatgtcccaatggaaacaacccacggtgctccattggattctgtgggatctgatgtctggagcacagaggagccgatgccaactaaagagacgggctgggcttctttttcagagttcacgtcttccctgagcacaaaagattctttaaggagtaattctccagtggaaatggaaaccagcactgaacccatggaccctctgactcccagtgcggctgccctggcagtgcagccagaagcggcaggcagtgtggccatggaagccagctctgacggagaggaggatgcagaaagtacagacaaggtaactgagacagtgatgaatggcggcatgaaggaaacgctcagcctcactgtagatgccaagacagagactgcggtcttcaaaagtgaggaagggaaactgtctacctctcaagatgctgcttgtaaagacgcagaggagtgtcccgagactgcagaggcgaagtgcgcggcgcccaggcctcccagcagcagtcccgagcagaggactggccaaccaagcgcaccaggtgacacttcagtgaatggccctgtatgacgggtgacgtctgctgctgctgactgaggactgcagaccgccaccactcaggggctctggaggggtcagctggagcccaccaagctgtcactgctgcactcactctgcaagggatcaggaccagcaacctttatattctagattctaagacattgtacagagaaattcagaagtgtaaaaatattgcacattgacaaataccaagaatttttgcgtatgtttatattgtattgttctaaataatgggtagcctgtgaaataagatcttgccacccatgtaataatagtagtaatactatagttaaaatggctgtaagaatagttttataaaagtgaatacacagatctattgtatttgaaacataactttgacaattattagtgtgaccaaagtattaggcggttttcatacatttttcaccttgtacaaaattatgaattcatttttcctccaggccgacaaggagttgtagaatgaaaatgccctctaagtgttattttggttgttctaacttacaaaagtgattttgaataagaaatatttggtgttctttttataaccagtttttgattggtaattgttttctgtattgtttaaaacggatcaaaaatgtaagtctattggtagagattaagtatttattgctacatcatagttgataaattgatgttatcgtaaagccatatgttctgttcaagtcttgtttgcttgaaatgattattcctacaagtgaaacactagactatttggagtgtatatggcttgtgttttgggatttttttttttttttttttggcttttgtttttgtttgtttttttgtttcgtttggtagttcatctgccttttaacccattcaccaaaatttaccttgttaacaagcatcaccaatgaacatttcagagcaatctgcatatttaacagacctaaaataaatcctattaggcaagtcagttgaaaatgctcgtgctgctaatggaattagagtgcgttcattttacaggctagtattttaaaaatagaaatcaaaatctggcaccgaagcatgctaattgtttactgtaccttgtgaggttttcactcataaatttaaaccagtgtattttttttagaactggtttgtgtatatatatagtgattatggatactaattcaatgtaatttataattttctatgtcaatacaaaaatacatcacagccttctcaaacagctcaagcaatatattgtatattgccatatcgtctggtgaaagggttaaattacttcacctcttgcacttttagatgcaaatcagtttttcatttctgtaatagaaaattattcacgtatttttacatcatttgtttttcctgaccagtatttaaaaccaaaaggatattctgaaaaatggccaacaatttttttagaagtagcatcccaagcagcgtgcctaaacattacattgcatatggaaataaaagaatcaaacgtctaatgcctt

SEQ ID NO: 18304 - protein, 201 aa, Homo sapiens [sequence omitted]

SEQ ID NO: 18305 - DNA, 2023 bp, Homo sapiens
  CDS (9)..(1154)
gcatcaccatggagccgagggcaggtgtctccaaacaggacatacgtgaacaaatttggggctacatggaatcacaaaatttagctgactttccccgacctgttcatcacaggatacccaactttaaggggtcttatctggcttgccaaaacatcaaagacctagacgtttttgccagaacacaggaagttaaagtggaccctgataaaccactggaaggcgttcggctgctggtgctgcagagcaaaaaaacattgttggttccaacaccacgactgagaacgggattgtttaataagatcacaccaccccctggggcaactaaagacatcttgagaaaatgtgccacctctcagggtgtgaggaactacagtgtccccataggcttggactccagagtcctcgtggatttagttgtggtgggatccgtcgccgtttctgaaaaaggctggagaatcgggaagggagaaggctacgccgatctggaatatgccatgatggtatccatgggcgccgtcagcaaggagacgccggtggtcaccatcgtccacgactgccaggtcgtggacatccctgaagagcttgttgaggagcacgacatcactgtggactacatcctcactccaaccagagtcatcgccacaggctgcaagcgcccaaagccaatgggaatcacctggttcaagatcagcctggagatgatggagaaaatccccatactgaggagcctccgcgcccgagagcagcaggctgggaaggatgtcaccctccagggtgagcaccagcaccttccggaaccaggctgccagcagacagtgcccctgagtgttggcaggaggcccccggacacacccggaccagaaaccaattccatggaggcagcccctggctccccaccaggggagggtgccccgcttgcagccgatgtttacgttgggaacctcccccgggacgcccgtgtgagtgacctgaagagagccctgcgggaactcggctccgtgcccctgcggctcacctggcagggcccgcggcgcagagccttcctccattacccggactctgccgcagcccagcaggccgtctcctgcttgcagggcctgcgcctgggcaccgacaccctgagggtggcgctggccaggcagcagagggacaagtgacctcgtggacagccacggagctcactgcagactcgccatccccgtcccctgccgctccggttccgatggcactcgagaggcctgcgtggcaagacgtgtcggagccaccgcctgagctgctcgggtctcaattcttctcagaagtcaccgctcagtgaacgcccaggccctcctgtgagtggggaagccgccctgcggttcatctcacagcgcgcagagactgcagcctcccaatcgtgcaggctcgggccttgagtcggtttctgtttctctggagggacagagcagaggggccagggactgagtgagtggctaagcaggggagggtgatgtgaaggtgatctcgagtttgccaggggtgggctgaacaggagaagatgaacaaaggatccggctctcaaaaggccctggcagggactggatgctgggtacagaagcgcgcccttgggcttcaggctcctgagctggcagcacggcagggagagctccatccatgtcgcaggagcccaggaagctcagcccctgggtaaaaagtgctcactgcagctcagatcagtcctcaggtcacatttcggggagccagcctcccctcttcccctccccagccccgctcctccctctgtggacacactccgggccctcagccagctggctgcatgaggagcagctttgtgctgtgggagagaccggctctgggagaatgggtttcatcccagcctacgtcacatttgcccagtgccttatgttttctgggttttttcctccagttctgtttctaaaaaccagcctgagtttggctgaactgtcctttctcaacagaagcgcttttgcaattgatcccgggcaacaagtcaaaataagctttt

SEQ ID NO: 18306 - protein, 382 aa, Homo sapiens [sequence omitted]

SEQ ID NO: 18307 - DNA, 2255 bp, Homo sapiens
cattcttatttctttttttcttgaatttagaatattttctatttatatttaatagatccaaattaagtatgttgctattgtacccgtgaacccttaaaactgggataagccttgatgtgggtgtctgggaactctttaaacatgtattggcagtgtgcaccttttttttccttttgagtggatttgaaattgttcatttataaatccctttcaagcctccctggctgagatcgacacatgagaagttatttccaaggggtgtttggaaatggcagactctgcgcacaccatgcggcctctccctcaccccaccgcctctcacctcggcctgcctgtgttcccttctcttttgtcttgacttcctgagctgcagactcctggcatctttgactcccttttcttcgctccccagggcaacctggtatcctggagggcttcttgcctacccagaaagtatacccttggtaaaccagtggtgactgcccgagcatccatttgtgcaggaagcctcctgcctttcggtgcccgagaacctcttcagaagtctctcctttgagcatggaatatttatttgtgtggccatgcatatttgggtgccttcttaatctgtagaatggggctagccctgccagcctcacgggccatgcactagcatggtgtcatgtgaggtgttaataagtgttccaagggtaaaatgggttgctctgtcaagtaagttggcaagaacaccgtagcatactaaaggttctgtgatgcccctcagtaaaaacacttaactcaagtttcctgagcatgcttggcctaggaacacttctctttgtagaacacttgtgacaccttgaggtcttcagggacacactccagtgttattacagaccttgcatgatgtcatgtgagtcctggggtttggtgtcatcgagaagatgggctcccctgctttagacctctgtgtggacttactatgttcttaaatcacacctctttaacccaattccttctccctaacccagcagcctctcaaagttgctggcaaaatacagaaaacctaagtaaaggaggtgatggccacatctgccacacatctctgtgtactgctttcatttctttttgcttttctcttgctgttggtcgtgggcttggtttgacatgatcttattctgcctgagcttatgtcttccgtgttcccaggagtgtgtatttggcatagaatacgtacatgtggccccgcttttgtgcttatcttgccattttcccccttccattttgtaaaatgagaagatgttgagttctggggttgacatcagttgattaaaataaagaccttgccccaaacctcttttgcacatactatggtgtggattttactttaaaaaaaaaatggttgatttcttaacttgctattccttctgagcatggtagggtttggcttctgtttcatggcaggaagggctaaggcggctccactgaagttcccgctgcagtccacctggaggcccagaccctgctggggttcacgctaagcactttgagggtggtaaacagccattgtcttggacttccgtcctaaccctctcttctccttgtcccccttcttcccttccctttctcctgcaaggttccgccacacttcaccactggcagcagttggcccaacctcaccttgggggcatcctggacccccggcccggtgtggtcaccaagggcttccggacgctggatgttgacctggacgaagtgtactgccttaacgactttgaagaagatgacacaggtgaccacatttctctcccacgcctagctacctccactccagttcagcacccagagacctcaggtgagaggtcccaagcacgtgtgactgtctcaggcagcagaagttacccgagccggcctcaggcttccccagaggagatgcaggagccgccagcggccacggaggaggaggaggaggaggaggaggaggaggaggggtctggtgagggcaccacgataagtcctgtaaacttggcacctttcccggaggcagagttttgggccattctcacctctgttccaggcaccatccgtagtggttctctgtctgtagcttccgctcgtctgtgtgggtgatgattaaagcattctcattgcacagttctgtttttaaatacagagtctgatgcctcctatttgtaacaatgggtgtagctcccctgcccatcttggaggtgcatggcccaccagggatctttaaagtgggagcaggaaaggctgct

SEQ ID NO: 18308 - DNA, 2498 bp, Homo sapiens
gaggagagctaaaaaagaactcaggcctgaatggttgtcaggaatttacttgggtgactatcttctcatctcagaacataaaatgtaggaattaccacagttgcaaagggagatgtttatgttggagataaaaatgctcctcccttcaaaaatgagacagtattttagataggaaaggttatttatctgattacatgttttaaaattctgagcgtaaggttatatgtcaaatcctgtccatgggctgggcacagtggcccacacctgtgatcctagcactttggaaggctgagggggaggattgattgagcccaggaggtcaaggctacagtgaactatgatcacaccactgcacttcaacctgggcagcagagcgagaccctgtctcaaaaaataaaaataaattaacaaaaaaatctggtccatgtccatctcctcttagctgctaattcaattttagattagacacagtggacaaggacaagtatggtgagagtcctgtgatttctcaccagcttcctttccacataggccactgcttctcttcttccaaggtttttccccgcttttgcctcctggaggttgtatcctgggtgttaggagactgggttccggacacattccccacagaaggatagcaggaccttagaagatctttttctttcttttcctggtttcctcttgtttgcaagagggttgaataggatggtctctaaaatcctgttgtttttctgggttatattaacccaggccataatgataagaacccgctctgaattcacaacatgtatttatacaacagcaatttaatatttcttattctgtggaatggctaggaagctctgctggtcttggttggatggttttttgtttgtttttttttgagacagggtctcgctttgtcgcccaggctggagtgcagtgacgccatcagctctctgcaacctccacttcccaggctcaagtgattctcttgctcagcctcccgagtagctgggactacagacacatgctactgcacccagctaatttctgtatttttagtagagatggggtttcaccatgttgcccaggctggtctcgacctcctgagctcaagtgatccacccaccttggtttcccaaagtgctgggattacaggtgtgagccaccgtgctcggctggtttttcttaaggtctcacctaggttcacttgtgtggctgaattcagctggtggtttggcaggggctggatgcagttacaacagaggatctgtctctttaaataactacccttcatccccaaagaggccagaccagctccttcacagtgctccaagagagcaagccatgacgcccaagcattttatccagcctctgcttgcttcagtttgctaaggtcccactggccaaagcagattacatggccaggtctaatgtcaatatgaagggggcactccacaaaagcgtgaacatgtaaggcatgactcatgagggtcactaatgtaatagtcaccacaacctccatgctaagttacctatattctccagtgaggatttctcaaggtggttttgttcatagtcttctaatagaattatttggaattatcagtttaatatgcttatgatgtatttcactggaaccatacaggttttgattcgcagagttgggagccctgggtagatactgaatcagactaagtttaatcacagaaattattcctacgtaagtctgatcttatgttttcaagatagcattgtaaaattcagagtatgttaccatccccctttgagacctctgctgtttttaataaatggaagcatttgggaatactatttggtaatagtttattaaaactacttcagagatattctggactttcatattagtcttagatatggattaataaacattagcaatgaatctgttatctaagagaaaaatttaaatttatattacaacagtggaatataatgtttaataacttgggggggttatgtgttttgtttgttttttttttttagctcttcagagaagtaagaataatgaagattttaaatcatcccaatataggtactttctgcttttttaaatattttggggtctaaatacgtacttgaaattatgtcataaagctaaacacgtattctagaaatggtagagtacacttctagtaaaatatatatacaagttgttgatcatttgtattagctttttgaaattgctgaagacaggttaaaagcttaggtattaaacgttgaatttaaagctttaatctggtagaaacatctgtactctgattataattttctaatttttaagtatattagaaaatataattgtattgcatgagtagatagaagggaattataggaagtcagaattaatattttcaaaggggctgagcacagtggctcatgcctgtaattccagcactttgggaaaccaaggcaggaggattgctggaggtcaggagctcaagaccagcctaagcaacagagcgagaccccgtctctcc

SEQ ID NO: 18309 - DNA, 2720 bp, Homo sapiens
tttcagctgttatggctaagtcagttaacctcatcaacaattttttcttctgtaaattgaggacaatttttgcttttatgaatgaagtcttaaccagcaggaagaaatataaacaaaggaacatatttttaatttaatgaagcaaaattccatacatcattttgaaaatagtgtttctttccctgataggcctgttctgcatcattcttttagcttccttctgccctgtttatcacttggtcccacttttatatttttcctcttcggtccagaatttcttatttagtttcttgtattttgcctactccctcccttctccatgattcagcctagtctttccgtcctctgtggacttgggtgtgccttcctctgggccacctcgtcttttgctgctgttagccctcccgcctgcgcacctgccacttcaccctcgcctgtggtccacttacgttccactcagcccggtcagtcctgctttgttcttctccaccgccttggtctcccgtgtgtcttatctagctctggttccttctcgtctccacatttattttgttttcttcctgtgcttgttagtccttgtgcacttggtccttgagctctttttctattaataggtattactagatggatttgttgtctgcctttacatagaacacacatccttactgtgcatttcctgggtagccaggatgaatcaattattattaacttcccttcgaacattgagcttcctctgttttctgtttctaagaattagattagtattctagaagactaatactactttaaagacagtcaaaacagtcatacgctgccatttcagccctttatttaagagtttgtgacatttatcactcccttgaaagattaaagaacacccaaagcaagtttggggtggaggtggggaaggcaggaagagaaaggtaagtgctataaaaggactcattgttaatttctagaaattggactgagatctgaaagcataagccttaacattttttagataaacggtccctgaaaagaataaaaagtatcagtacttccgttaactagctttagtattgggtcatttgtagtttacattctcctttaagttttaagaccttcagtagttaacaaagcagacagagactggccgggcacagtggctcacacctgtaataccagcactttgggaggctgagttgggtggatcacaaggtcaggagattgaaaccatcctggccaacatggtgaaaccccgtctctactaaaaatacaaaaaaaaaaaaaaaattagccaggcgtggtggcaggcacctgtggtcccagctactcgggaggctggggcaggagaatttcttgaacccgggaggccgaggttgcagtgagctgagatcgcgccactgcactccagcctgggtgacagcgagactctgtcaaaaaaaaaaaaaaaaaaaaaaaaagcagagacttaatcttgtaaatactcattttatttttgagaggcttaatgtctccttaaatattaacctgtgtcattttgtaattatactgtaatagtgtcagaatgccattaacaaccaacccttttcgtttcttgtgtgggaaagctcataaattgtgtggtcttacccctctggaccctgtagttgtagcattgtgaaaatggagcttttggcaaaactttgtattatgctgttgactcacattgtctcatatttttcctttattcttctatattctatgaatatggtgctgtcctgtcatttaattattataatatatgtgaactgctggaggtagactgatgtgagtgcagtttttcaacttaaaaacccttatatatcacattcatggtgtttaagatataagaacagccctacaaagaggggttgattgtattgaagattctttctgctgagcctgccttaattgtgagggtggttgtttgggtatcttagagctctatgttctattttcagttttctaggaaaccagaaaaacatgggtagtagaaatgtatagaaaatgtatgaggtctcttaaccattgtgttaaacttgcattaagcttcttttttagcaatatcgatgtcagtgttacctcttctttcctttttatttattttttttgagacagagtctcattctgtcgcccagactggttggagtgcgatgatgcgatcgcggctaactgcaaccgctgcctcccaggtacaagtaattctcgtgccttgggctcccgagtagctgggatttttagtagagaacaggtttcaccatattggccaggctggtcttgaactcgcaacctcaggtgatccacccacctcagcctccccaaagtgttgggattacaggcatgagccaccatacctggccccttttgttgttttgaggggcaggcagtaagaagcagggatttcttcaaatgctagtaagcacaaagagagggagaagtttttgtaagtaacgaacagggccgggcatggtggcgtgagaggccgaggtgggcagatcacgaggtcaggagttcgagaccagcctgaccagcgtggtgaaacccccgtctccactagaagtgcaaaggttagccgggcatggtggtgcacgcctgtggtccagctagtcgggaggctgaggcaggagaatcgcttgagcctgggaggtggaggttgcagggagctgagatcacgccactgcactccagcctgggcgacagagtaagactcccgtctc

SEQ ID NO: 18310 - DNA, 1450 bp, Homo sapiens
  CDS (7)..(1323)
gaagatatggcggcgtctgcgtctgcagctgcaggggaggaggactgggtccttccctctgaagttgaagtattggagtccatctatctagatgaactacaggtgattaaaggaaatggcagaacttcaccatgggagatctacatcactttgcatcctgccactgcagaggaccaggattcacagtatgtctgcttcactctggtgcttcaggtcccagcagagtatccccatgaggtgccacagatctctatccgaaatccccgaggactttcagatgaacagatccacacgatcttacaggtgctgggccacgtggccaaggctgggctgggcactgccatgctgtatgaactcattgagaaagggaaggaaattctcacagataacaacatccctcatggccagtgtgtcatctgcctctatggtttccaggagaaggaggcctttaccaaaacaccctgttaccactacttccactgccactgccttgctcggtacatccagcacatggagcaagagctgaaggcacaaggacaggagcaggaacaggaacggcagcatgctacaaccaaacagaaggcagtcggtgtgcagtgtccagtgtgcagagagcccctcgtgtatgatcttgcctcactgaaagcagcccctgaaccccaacagcccatggagctgtaccagcccagtgcagagagcttgcgccagcaagaagaacgcaagcggctctaccagaggcagcaggagcgggggggaatcattgaccttgaggctgagcgaaaccgatacttcatcagccttcagcagcctcctgcccctgcggaacctgagtcagctgtagatgtctccaaaggatcccaaccacccagcacccttgcagcagaactatccacctcaccagccgtccaatccactttgccacctcctctgcctgtggcgacccagcacatatgtgagaagattccagggaccaggtcaaatcagcaaaggttgggcgaaacccagaaagctatgctagatccccccaagcccagtcgaggtccctggcgacagcccgaacggaggcacccaaagggaggggagtgccacgcccctaaaggtacccgtgacacccaggaactgccacctcctgaggggcccctcaaggagcccatggacctaaagccagaaccccatagccaaggagttgaaggtcctccacaagagaaggggcctggcagctggcaggggcccccaccccgcaggactcgggactgtgttcgctgggagcgctctaaaggccggacacccggttcttcctaccctcgcctgcctcggggccagtagcataccggcctggtactcggagggagtccctgggcctggaatctaaggatggttcctagcaggacttggtggggggaacagggaattggggatgggagggaggcaataaagatatttggccttc

SEQ ID NO: 18311 - protein, 439 aa, Homo sapiens
MAASASAAAGEEDWVLPSEVEVLESIYLDELQVIKGNGRTSPWEIYITLHPATAEDQDSQYVCFTLVLQVPAEYPHEVPQISIRNPRGLSDEQIHTILQVLGHVAKAGLGTAMLYELIEKGKEILTDNNIPHGQCVICLYGFQEKEAFTKTPCYHYFHCHCLARYIQHMEQELKAQGQEQEQERQHATTKQKAVGVQCPVCREPLVYDLASLKAAPEPQQPMELYQPSAESLRQQEERKRLYQRQQERGGIIDLEAERNRYFISLQQPPAPAEPESAVDVSKGSQPPSTLAAELSTSPAVQSTLPPPLPVATQHICEKIPGTRSNQQRLGETQKAMLDPPKPSRGPWRQPERRHPKGGECHAPKGTRDTQELPPPEGPLKEPMDLKPEPHSQGVEGPPQEKGPGSWQGPPPRRTRDCVRWERSKGRTPGSSYPRLPRGQ

SEQ ID NO: 18312 - DNA, 4610 bp, Homo sapiens
  CDS (485)..(2821)
ccctcgcgctactgcgggagcagcgtcctcccgggccacggcgcttcccggccccggcgtccccggaccatggcgctctccgggctcttctctagctctcagcggctgcgaagtctgtaaacctggtggccaagtgattgtaagtcaggagactttccttcggtttctgcctttgatggcaagaggtggagattgtggcggcgattacagaaaacatctgggaagacaagttgctgtttttatgggaatcgcaggcttggaagagacagaagcaattccagaaataaattggaaattgaagatttaaacaatgttgttttaaaatattctaacttcaaagaatgatgccagaaacttaaaaaggggctgcgcagagtagcaggggccctggagggcgcggcctgaatcctgattgcccttctgctgagaggacacacgcagctgaagatgaatttgggaaaagtagccgcttgctactttaactatggaagagcagggccacagtgagatggaaataatcccatcagagtctcacccccacattcaattactgaaaagcaatcgggaacttctggtcactcacatccgcaatactcagtgtctggtggacaacttgctgaagaatgactacttctcggccgaagatgcggagattgtgtgtgcctgccccacccagcctgacaaggtccgcaaaattctggacctggtacagagcaagggcgaggaggtgtccgagttcttcctctacttgctccagcaactcgcagatgcctacgtggacctcaggccttggctgctggagatcggcttctccccttccctgctcactcagagcaaagtcgtggtcaacactgacccagtgagcaggtatacccagcagctgcgacaccatctgggccgtgactccaggttcgtgctgtgctatgcccagaaggaggagctgctgctggaggagatctacatggacaccatcatggagctggttggcttcagcaatgagagcctgggcagcctgaacagcctggcctgcctcctggaccacaccaccggcatcctcaatgagcagggtgagaccatcttcatcctgggtgatgctggggtgggcaagtccatgctgctacagcggctgcagagcctctgggccacgggccggctagacgcaggggtcaaattcttcttccactttcgctgccgcatgttcagctgcttcaaggaaagtgacaggctgtgtctgcaggacctgctcttcaagcactactgctacccagagcgggaccccgaggaggtgtttgccttcctgctgcgcttcccccacgtggccctcttcacctttgatggcctggacgagctgcactcggacttggacctgagccgcgtgcctgacagctcctgcccctgggagcctgcccaccccctggtcttgctggccaacctgctcagtgggaagctgctcaagggggctagcaagctgctcacagcccgcacaggcatcgaggtcccgcgccagttcctgcggaagaaggtgcttctccggggcttctcccccagccacctgcgcgcctatgccaggaggatgttccccgagcgggccctgcaggaccgcctgctgagccagctggaggccaaccccaacctctgcagcctgtgctctgtgcccctcttctgctggatcatcttccggtgcttccagcacttccgtgctgcctttgaaggctcaccacagctgcccgactgcacgatgaccctgacagatgtcttcctcctggtcactgaggtccatctgaacaggatgcagcccagcagcctggtgcagcggaacacacgcagcccagtggagaccctccacgccggccgggacactctgtgctcgctggggcaggtggcccaccggggcatggagaagagcctctttgtcttcacccaggaggaggtgcaggcctccgggctgcaggagagagacatgcagctgggcttcctgcgggctttgccggagctgggccccgggggtgaccagcagtcctatgagtttttccacctcaccctccaggccttctttacagccttcttcctcgtgctggacgacagggtgggcactcaggagctgctcaggttcttccaggagtggatgccccctgcgggggcagcgaccacgtcctgctatcctcccttcctcccgttccagtgcctgcagggcagtggtccggcgcgggaagacctcttcaagaacaaggatcacttccagttcaccaacctcttcctgtgcgggctgttgtccaaagccaaacagaaactcctgcggcatctggtgcccgcggcagccctgaggagaaagcgcaaggccctgtgggcacacctgttttccagcctgcggggctacctgaagagcctgccccgcgttcaggtcgaaagcttcaaccaggtgcaggccatgcccacgttcatctggatgctgcgctgcatctacgagacacagagccagaaggtggggcagctggcggccaggggcatctgcgccaactacctcaagctgacctactgcaacgcctgctcggccgactgcagcgccctctccttcgtcctgcatcacttccccaagcggctggccctagacctagacaacaacaatctcaacgactacggcgtgcgggagctgcagccctgcttcagccgcctcactgttctcagactcagcgtaaaccagatcactgacggtggggtaaaggtgctaagcgaagagctgaccaaatacaaaattgtgacctatttgggactttggaaatcagtagacaccatatgcttcaaaaaacaggggctattaaaatgacatcaggagccagaaagtctcatggctgtgctttctcttgaagtttatacaacaaccagatcaccgatgtcggagccagactgggaaaaaacaaaataacaagtgaaggagggaagtatctcgccctggctgtgaagaacagcaaatcaatctctgaggttgggatgtggggcaatcaagttggggatgaaggagcaaaagccttcgcagaggccctgcggaaccaccccagcttgaccaccctgagtcttgcgtccaacggcatctccacagaaggaggaaagagccttgcgagggccctgcagcagaacacgtctctagaaatactgtggctgacccaaaatgaactcaacgatgaagtggcagagagtttggcagaaatgttgaaagtcaaccagacgttaaagcatttatggcttatccagaatcagatcacagctaaggggactgcccagctggcagatgcgttacagagcaacactggcataacagagatttgaacttgtttggaacttgtcataaaatcgatcagtttggtgaattgcaaccaacaatatttaaaaagaaaacagaacagaacaaaatatcaggatgcaatgtgcatgcctaaatggaaacctgataaaaccagaggaggccaaagtctatgaagatgagaagcggattatctgtttctgagaggatgctttcctgttcatggggtttttgccctggagcctcagcagcaaatgccactctgggcagtcttttgtgtcagtgtcttaaaggggcctgcgcaggcgggactatcaggagtccactgcctccatgatgcaagccagcttcctgtgcagaaggtctggtcggcaaactccctaagtacccgctacaattctgcagaaaaagaatgtgtcttgcgagctgttgtagttacagtaaatacactgtgaagagactttattgcctattataattatttttatctgaagctagaggaataaagctgtgagcaaacagaggaggccagcctcacctcattccaacacctgccatagggaccaacgggagcgagttggtcaccgctcttttcattgaagagttgaggatgtggcacaaagttggtgccaagcttcttgaataaaacgtgtttgatggattagtattatacctgaaatattttcttccttctcagcactttcccatgtattgatactggtcccacttcacagctggagacaccggagtatgtgcagtgtgggatttgactcctccaaggttttgtggaaagttaatgtcaaggaaaggatgcaccacgggcttttaattttaatcctggagtctcactgtctgctggcaaagatagagaatgccctcagctcttagctggtctaagaatgacgatgccttcaaaatgctgcttccactcagggcttctcctctgctaggctaccctcctctagaaggctgagtaccatgggctacagtgtctggccttgggaagaagtgattctgtccctccaaagaaatagggcatggcttgcccctgtggccctggcatccaaatggctgcttttgtctcccttacctcgtgaagaggggaagtctcttcctgcctcccaagcagctgaagggtgactaaacgggcgccaagactcaggggatcggctgggaactgggccagcagagcatgttggacaccccccaccatggtgggcttgtggtggctgctccatgagggtgggggtgatactactagatcacttgtcctcttgccagctcatttgttaataaaatactgaaaacactc

SEQ ID NO: 18313 - protein, 779 aa, Homo sapiens [sequence omitted]

SEQ ID NO: 18314 - DNA, 1737 bp, Homo sapiens
  CDS (115)..(1512)
gatagtttatggaaagaatttgaaactccagagaaagcaaacaaaatagtaaagctaaaacattttgagaaatttcaggatacagcagaagcattagcagcattcacagctctgatggagggcaaaatcaataagcagctgaaaaaagttctgaagaaaatagtaaaagaagcccatgaaccgctggcagtagctgatgctaaactaggaggggtcataaaggaaaagctgaatctcagttgtatccatagtcctgttgttaatgaacttatgagaggaattcgttcacaaatggatggattaatccctggggtagaaccacgtgaaatggcagctatgtgtcttggattggctcacagcctgtctcgatatagattgaagtttagcgctgataaagtagacacaatgattgttcaggcaatttccttgttagatgacttggataaagaactaaacaactacattatgcgatgtagagaatggtatggctggcatttccctgaattaggaaaaattatttcagataatttaacatactgcaagtgtttacagaaagttggcgataggaagaactatgcctctgccaagctttctgagttgctgccagaagaagttgaagcagaagtgaaagcagctgcagagatatcaatgggaacagaggtttcagaagaagatatttgcaatattctgcatctttgcacccaggtgattgaaatctctgaatatcgaacccagctctatgaatatctacaaaatcgaatgatggccattgcacccaatgttacagtcacggttggggaattagttggagcacggcttattgctcatgcaggttctcttttaaatttggccaagcatgcagcttctaccgttcagattcttggagctgaaaaggcacttttcagagccctcaaatctagacgggatacccctaagtatggtctcatttatcatgcttcactcgtgggccagacaagtcccaaacacaaaggaaagatttctcgaatgctggcagccaaaaccgttttggctatccgttatgatgcttttggtgaggattcaagttctgcaatgggagttgagaacagagccaaattagaggccaggttgagaactttggaagacagagggataagaaaaataagtggaacaggaaaagcattagcaaaaacagaaaaatatgaacacaaaagtgaagtgaagacttacgatccttctggtgactccacacttccaacctgttctaaaaaacgcaaaatagaacaggtagataaagaggatgaaattactgaaaagaaagccaaaaaagccaagattaaagttaaagttgaagaagaggaagaagaaaaagtggcagaagaagaagaaacatctgtgaagaagaagaagaaaaggggtaaaaagaaacacattaaggaagaaccactttctgaggaagaaccatgtaccagcacagcaattgctagtccagagaaaaagaagaaaaagaaaaaaaagagagagaacgaggattaacagaaaggaattacgattatatcacccggacacacatcatgcttaagattcaactgggagcataccagggatgctctctaacgtaatcaagggaaggttcagtaagacaaagtgatttatcatctataacttcaaacctatttgtcttgacatcaactctgttaaccttatgtcatcatttcttagagtctttgatatacaaataaaattttctttgtattt

SEQ ID NO: 18315 - protein, 466 aa, Homo sapiens [sequence omitted]

SEQ ID NO: 18316 - DNA, 2858 bp, Homo sapiens
  CDS (204)..(2729)
aacacgattcctctggccaggccaaggggagggcgacactgacaggcgccccccacccaggggccgtggcgaagcaaggggccggctgctcagaaaaggataagaagtggtttctcctcccctcttcccttcctcatcctgcagcccgcgcctcccccctcgccgcgctgcgcacggatggcggcgggagccgcagagccaccatgttcagccagcagcagcagcagcagctccagcaacagcagcagcagctccagcagttacagcagcagcagctccagcagcagcaattgcagcagcagcagttactgcagctccagcagctgctccagcagtccccaccacaggccccgttgcccatggctgtcagccgggggctccccccgcagcagccacagcagccgcttctgaatctccagggcaccaactcagcctccctcctcaacggctccatgctgcagagagctttgcttttacagcagttgcaaggactggaccagtttgtaatgccaccagccacgtatgacactgccggtctcaccatgcccacagcaacactgggtaacctccgaggctatggcatggcatccccaggccttgcagcccccagcctcacacccccacaactggccactccaaatttgcaacagttctttccccaggccactcgccagtccttgctgggacctcctcctgttggggtccccatgaacccttcccagttcaacctttcaggacggaacccccagaaacaggcccggacctcctcctctaccacccccaatcgaaaggattcttcttctcagacaatgcctgtggaagacaagtcagaccccccagaggggtctgaggaagccgcagagccccggatggacacaccagaagaccaagatttaccgccctgcccagaggacatcgccaaggaaaaacgcactccagcacctgagcctgagccttgtgaggcgtccgagctgccagcaaagagattgaggagctcagaagagcccacagagaaggaacctccagggcagttacaggtgaaggcccagccgcaggcccggatgacagtaccgaaacagacacagacaccagacctgctgcctgaggccctggaagcccaagtgctgccacgattccagccacgggtcctgcaggtccaggcccaggtgcagtcacagactcagccgcggataccatccacagacacccaggtgcagccaaagctgcagaagcaggcgcaaacacagacctctccagagcacttagtgctgcaacagaagcaggtgcagccacagctgcagcaggaggcagagccacagaagcaggtgcagccacaggtccacacacaggcacagccaagcgtccagccacaggagcatcctccagcgcaggtgtcagtgcagccaccagagcagacccatgagcagcctcacacccagccgcaggtgtcgttgctggctccagagcaaacaccagttgtggttcatgtctgcgggctggagatgccacctgatgcagtagaagctggtggaggcatggaaaagaccttgccagagcctgtgggcacccaagtcagcatggaagagattcagaatgagtcggcctgtggcctagatgtgggagaatgtgaaaacagagcgagagagatgccaggggtatggggcgccgggggctccctgaaggtcaccattctgcagagcagtgacagccgggcctttagcactgtacccctgacacctgtcccccgccccagtgactccgtctcctccacccctgcggctaccagcactccctctaagcaggccctccagttcttctgctacatctgcaaggccagctgctccagccagcaggagttccaggaccacatgtcggagcctcagcaccagcagcggctaggggagatccagcacatgagccaagcctgcctcctgtccctgctgcccatgccccgggacgtcctggagacagaggatgaggagcctccaccaaggcgctggtgcaacacctgccagctctactacatgggggacctgatccaacaccgcaggacacaggaccacaaggttgccaaacaacccttgcgacccttctgcaccgtttgcaaccgctacttcaaaacccctcgcaagtttgtggagcacgtgaagtcccaggggcataaggacaaagccaaggagctgaagtcgcttgagaaagaaattgctggccaagatgaggaccacttcattacagtggacgctgtgggttgcttcgagggtgatgaagaagaggaagaggatgatgaggatgaagaagagatcaaggttgaggaggaactctgcaagcaggtgaggtccagagatatatccagagaggagtggaagggctcggagacctacagccccaatactgcatatggtgtggacttcctggtgcccgtgatgggctatatctgccgcatctgccacaagttctatcacagcaactcaggggcacagctctcccactgcaagtccctgggccactttgagaacctgcagaaatacaaggcggccaagaaccccagccccaccacccgacctgtgagccgccggtgcgcaatcaacgcccggaacgctttgacagccctgttcacctccagcggccgcccaccctcccagcccaacacccaggacaaaacacccagcaaggtgacggctcgaccctcccagcccccactacctcggcgctcaacccgcctcaaaacctgatagagggacctccctgtccctggcctgcctgggtccagatctgctaatgctttttaggagtctgcctggaaactttgacatggttcatgtttttactcaaaatccaataaaacaaggtagtttggc

SEQ ID NO: 18317 - protein, 842 aa, Homo sapiens [sequence omitted]

SEQ ID NO: 18318 - DNA, 2540 bp, Homo sapiens
  CDS (348)..(2363)
gtcacgtgctcgctgccgccgctgccgccgccgaagcggagaccggagccgcgagcgccaccagggcagcagccgccgcagccgccgccgctgggcagaggagccggagacgcgagcgggcgaggtggcggcggcggcggagcgggagcgggtaccgggcgcgggcagagcgcggcggcgcgggtgtgttccagagaacaagccttcagacatttgctatattgacgctgagctgtcaggggactcaggcttatgaggaggtattgttacacaaaacagtgtctagtgaagacgacaagaaagaggggaaaggatcggaaaaagaagctaaaatactatagaaaaccatgagatctattcgatcttttgctaatgatgatcgccatgttatggtgaaacattcaacaatctatccatctccggaggaacttgaagctgttcagaatatggtatctactgttgaatgtgctcttaaacatgtctcagattggttggatgaaacaaataaaggcacaaaaacagagggtgagacagaagtgaagaaagatgaggccggagaaaactattccaaggatcaaggtggtcggacattgtgtggtgtaatgaggattggcctggttgcaaaaggcttgctgattaaagatgatatggacttggagctggttttaatgtgcaaagacaaacccacagagaccctgttaaatacagtcaaagataatcttcctattcagattcagaaactcacagaagagaaatatcaagtggaacaatgtgtaaatgaggcatctattataattcggaatacaaaagagcccacgctaactttgaaggtgatacttacctcacctctaattagggacgaattggagaagaaggatggagaaaatgtttcgatgaaagatcctccggacttattggacaggcagaaatgcctgaacgccttggcgtctcttcgacatgccaaatggtttcaggcaagggcaaatggattaaagtcatgtgtaattgtcctccgcattctgcgtgatttgtgcaacagagtccccacatgggcaccattgaaaggatggccactagaacttatatgtgaaaagtctataggtacttgtaatagacctttgggcgctggggaggccttgagacgagtaatggagtgtttggcatctggaatactacttcctgggggtcctggtcttcatgatccttgtgagcgagacccaacagatgctctgagctatatgaccatccagcaaaaagaagatattacccacagtgcacagcatgcactcagactatcagcctttggccagatttacaaagtgctggagatggacccccttccatctagtaagccttttcagaagtattcctggtcagttactgataaagaaggtgctgggtcttcagctctaaagaggccatttgaagatggattaggggatgataaagaccccaacaagaagatgaaacgaaacttaaggaaaattctggatagtaaagcaatagaccttatgaatgcactaatgaggctaaatcagatcaggcctgggcttcagtataagctcctatctcagtctggccccgttcatgccccagtcttcacaatgtctgtagatgtggatggcacaacatatgaagcctcaggaccatccaagaaaacagcaaaacttcacgtagcggtgaaggtattgcaggcaatgggatatccaacaggctttgatgcagatattgaatgtatgagttccgatgaaaaatcagataatgaaagtaaaaatgaaacagtgtcttcaaactcaagcaataatactggaaattctacaactgaaacctccagtaccttagaggtaagaactcagggccctatcctcacagcaagtggcaaaaaccctgtaatggagctcaatgaaaaaagaagaggtctcaagtatgaactcatctcagagactggtggaagccatgacaagcgctttgtaatggaggtagaagtagatggacagaaattcagaggcgcaggtccaaataagaaagtggcaaaggcgagtgcagctttagctgccttggagaaactgttttctggacccaatgcggcaaataataagaaaaagaagattatccctcaggcaaagggcgttgtgaatacagctgtgtctgcagcagtccaagctgttcggggcagaggaagaggaactctaacaaggggagcttttgttggggcgacagctgctcctggctacatagctccaggctatggaacaccatatggttacagcacagctgcccctgcctatggtttacccaagagaatggttctgttacccgttatgaaatttccaacatatcctgttccccactactcattcttttagcaaatgacagaagctaattcctattgaacaacaatacagtacaacacagaatgttagagaaaaagcctttttatcctgctttctttgaacacatacttgatcaaaattatttgtaaagaacatctttcctactttttgattttaacaaatgcaaatttagttctctaaaacttg

SEQ ID NO: 18319 - protein, 672 aa, Homo sapiens
MRSIRSFANDDRHVMVKHSTIYPSPEELEAVQNMVSTVECALKHVSDWLDETNKGTKTEGETEVKKDEAGENYSKDQGGRTLCGVMRIGLVAKGLLIKDDMDLELVLMCKDKPTETLLNTVKDNLPIQIQKLTEEKYQVEQCVNEASIIIRNTKEPTLTLKVILTSPLIRDELEKKDGENVSMKDPPDLLDRQKCLNALASLRHAKWFQARANGLKSCVIVLRILRDLCNRVPTWAPLKGWPLELICEKSIGTCNRPLGAGEALRRVMECLASGILLPGGPGLHDPCERDPTDALSYMTIQQKEDITHSAQHALRLSAFGQIYKVLEMDPLPSSKPFQKYSWSVTDKEGAGSSALKRPFEDGLGDDKDPNKKMKRNLRKILDSKAIDLMNALMRLNQIRPGLQYKLLSQSGPVHAPVFTMSVDVDGTTYEASGPSKKTAKLHVAVKVLQAMGYPTGFDADIECMSSDEKSDNESKNETVSSNSSNNTGNSTTETSSTLEVRTQGPILTASGKNPVMELNEKRRGLKYELISETGGSHDKRFVMEVEVDGQKFRGAGPNKKVAKASAALAALEKLFSGPNAANNKKKKIIPQAKGVVNTAVSAAVQAVRGRGRGTLTRGAFVGATAAPGYIAPGYGTPYGYSTAAPAYGLPKRMVLLPVMKFPTYPVPHYSFF

SEQ ID NO: 18320 - DNA, 1719 bp, Homo sapiens
aagcaaaatccttttaaacacagaaatcctgagttcttctcattggtggactcaagcaattctgtagcaaataaatcctttgaaagagctccaaattggtggcattatcctttcaaaatctcagggatttgggatgaagtgaagaggtcaaattactttttagaagaagggaatctaaaaaccatctctcctaaacaaatggtagactggctttacttaagggatatttgtctttataggagtacataaatttatcttaatgatatttaagtagttttttttttttttttttgggacgaagttttgctcttgttgcccaggctgtatcgcaatggcgcggtctctgctcactgcagcatccgcctcccgggttcgggcggttctcctgcctcagcctcccgagtagctgggattacaggcgcccgccaccacacccagctaattttttgtatatttggtagagacggggtttcaccgtgttgaccaggctggtctcgagcttctggcctcaggtgatccacctgcctcagcctcccaaattgctgggattgcaggcgtgagccaccttgcccagccaatttttttttaaagagacatggtcttgctatgttgcccaggttggtcttgaactcctggcctcaagagatccccccaaccttggcctccaaagtgctgggattacaggcatgagccaccgcgcctggcctcaagtaagtttttataccatgataggggaaaacctggaaggctaagagatgtgctgttttccttcatgggaccccactttccacagtaaacaactggtataatcatttattacgttgtatgcaaattttgccttagacaacatttgtctggttccttattaataacttgcatctgatctgcttagagttgcttaattataagtaaatataatcccagtagcatttagccttaatctcaagagttcaaaatgtttaacacattctacctgacgggaggtggtgacctcattcagtcggttaagagcctgagccctgtgaagttaaacacctgctcatggtcacatagcccaggcagaagaaaatctcggacttggaatagatcccagttgcctgataattcatctcattattgcctctaaagcaaattggagactgggcacagtggctcccacctttaatcccagcacctggggaggctgaggtgagtggatcactagaggtcgggagttcgagaccagtctggccgacatggtgaaactcagtctctattgaagatacgaaagttggctcagtgtggtggcacacacttgtggtcccagctactcgggaggctgaggcatgagagtcgcttggacccgggaggcggaggttgcagtgagctgagatcgcaccattgcactctagtctgggtgacagagcgagactctgtctcaaaaaaaaaaaaataaagccgggcgtggtggctcacgcctgtaatcccggcactttgggaggctgaggcaggcggattgcctgagatcgggagttcgagaccggcctggccaacatggtgaaaccttgtctctactaaaactacaaaaaaaattggccaggcgtggtggcgggcgcctgtgatcccagctactcgggaggctgaggcagcagaatcgtttgaacccgggaggcggaggttgcagtgagtggagatcgtgcctgtgtgctccagcctgagcaacaagagcgaaactgtctc

SEQ ID NO: 18321 - DNA, 1523 bp, Homo sapiens
  CDS (447)..(1052)
agtctgaggaacataatgacaaagaacattcttctgataaaggaagagagcgactaaattcatctgaaaatggtgaggacaggcacaaacgcaaagaaagaaagtcatcaagaggcagaagtcactcaagatctaggtctcgtgaaagacgccatcgtagtagaagcagggagcggaagaagtctcgatccaggagtagggagcggaagaaatcgagatccagaagcagagagaggaagaaatcgagatccagaagcagggaaagaaaacggcggatcaggtctcgttcccgctcaagatcaagacacaggcataggactagaagcaggagtaggacaaggagtaggagtcgagatagaaagaagagaattgaaaagccgagaagatttagcagaagtttaagccggactccaagtccacctcccttcagaggcagaaacacagcaatggatgcacaggaagctttagctagaaggttggaaagggcaaagaaattacaagaacagcgagaaaaggaaatggttgaaaaacaaaaacaacaagaaatagctgcagctgcagctactggaggttctgttctcaatgttgctgccctgttggcatcaggaacacaagtaacacctcagatagccatggcagctcagatggcagccctgcaagctaaagctttggcagagacaggaatagctgttcctagctactataacccagccgctgttaatccaatgaaatttgctgaacaagagaaaaaaaggaaaatgctttggcagggcaagaaagaaggggacaaatcccaatctgctgaaatatgggaaaaattgaattttggaaacaaggaccaaaatgtcaaatttaggaaattgatgggtattaagagtgaagatgaagctggatgtagctcagttgatgaagaaagttacaagactctgaagcagcaggaagaagtatttcgaaatttagatgctcagtatgaaatggcaagatcacaaacccacacacaaagaggaatgggtttgggtttcacatcttcaatgcgaggaatggatgcagtttgaaaatgatcacacttgtaaagtttgggacttatagacttcttgttctgatgtcacgtccttgttcaccaaacagctagcactctagcttgcatgggtgttgcattgactttaatttattgaaaaatacaaatttttgtaaatatcagatcagtgatactggtgttagtgttgtaatcaggttaaacccacttccattaaacttgacaggactatagaaggataatattttttagttcatgaattctacttttcaaatatataaaagctgcaggtggggataaaatctcatacatggattttttcgtgtccgctgtcttgtgtacttttgtacttaaccttgtacagttattttcatctcttgaaacatgaaagaaatgttatgtagatgttctttagaagatctggccatttggtacataatccagcacagataagctgggtggtaatgataataaaaatggttttctc

SEQ ID NO: 18322 - protein, 202 aa, Homo sapiens
MDAQEALARRLERAKKLQEQREKEMVEKQKQQEIAAAAATGGSVLNVAALLASGTQVTPQIAMAAQMAALQAKALAETGIAVPSYYNPAAVNPMKFAEQEKKRKMLWQGKKEGDKSQSAEIWEKLNFGNKDQNVKFRKLMGIKSEDEAGCSSVDEESYKTLKQQEEVFRNLDAQYEMARSQTHTQRGMGLGFTSSMRGMDAV

SEQ ID NO: 18323 - DNA, 1395 bp, Homo sapiens
  CDS (34)..(1002)
ctcaggtgcttgcgaggtgatcagaaggcaaagatgtcggagcgaaaagtattaaacaaatactacccgccggactttgacccatcaaagatccccaaactcaagctccccaaagaccggcagtacgtggtgcggctgatggcccccttcaacatgaggtgtaagacgtgcggagaatacatctacaaggggaagaaattcaatgctcggaaggagacggtgcagaacgaggtctacctgggcctgcccatcttccgcttttacatcaagtgcacgcgctgcctggcagagatcaccttcaagacagaccctgaaaacacagactacaccatggagcatggagccacgcggaatttccaggctgagaagctcctggaggaggaggagaagagggtgcagaaggagcgggaggacgaggagctgaacaaccccatgaaggtgctggagaaccggaccaaggactccaagctggagatggaggtgctggagaacctccaggagctgaaagacctgaaccagcggcaggcgcacgtggacttcgaggctatgctgaggcagcaccgcctgtcggaggaggagcggcggaggcagcagcaggaggaggacgagcaggagaccgcggccctgttggaggaagccagaaagcgaagactgctggaggactccgactcagaggatgaggctgctccctcgcccctgcagccagcccttcggcccaaccccaccgccatcctggatgaggccccaaagcccaagaggaaggtggaggtccgggagcagagcgttggcagcctgggcagccggcccccgctgtcgaggctggtcgtggtgaagaaggcaaaggccgacccggactgcagcaacgggcagcctcaggcggcccccaccccaggagccccgcagaacaggaaggaggccaaccctacacccctgacgcctggcgcgtcctccctgagccaactgggtgcatacctggacagtgacgacagcaacggcagcaactgagccctcccaggaccccctcacggggtcaaagtcacacgtccagcttcagccacattgaggccagcattgctggtggtcagggcaggaggccttggcgtgactggaggccggacagacaagcgccagcgtgctccaacacatagggccaccaggggcctcagccccaggaggtcccttctctgtgccctcaccagcctctcaacacctcggggacccctgctgctcctgcccccacctgtcactgtgcttagggctgcaacatccctggagcagcttccaacactacttcagggtggcagtgtttggggcactgggcgagcctgccggcctctagatggcctcatctcttccttccacaaactgtctagaaccaataaaaggaaacctgcc

SEQ ID NO: 18324 - protein, 323 aa, Homo sapiens [sequence omitted]

SEQ ID NO: 18325 - DNA, 2000 bp, Homo sapiens
  CDS (433)..(1998)
aaagcactagtggcttgccagattgtcctaccagacccaggtattgcaggctttactgtcattgactacttccatcaacttttgcagacttttaatttcaggaaacttcagtgtgactctcaggcacctaacaatcacttacttgctttagatcactcaaatagtgatctcagcagcatatatacttctgacagcacttctgattttttcaagtcctgcagcaaggatactttttcaaaattctggcagccatcacttgaattcacttgcattgtttcacaactaacagataatgatgatttttcagcttcagaacaaagtaaggcctctggtactcttcagcagaacagaaagtccatctccattgcagaggccactggttccagtagctgccatgatcccattcaggattcatggagccttgtttcatatatggataaaaagagtacagcagaaaagttgggtaaagaacttggcttacaagctaaggagctgagtgcagttcacagcagtcatcatgaaattggagttaatgactctaatttattctctttggaaatgcgagagccccttgagtcaagtaatacaaaatccttccacagtgcagtggaaattaaaaataggtcccagcatgagctaccatgttttcagcatcatggtatagataccccaactagccttcagaagagatctgcatgttgtccaccttcgttactcagacttgaagagacagccagcagttcccaggatggtgaccctcaaatttgggatgatctgccattctctgaaagcctgaacaagtttctggcagttcttgaaagtgagattgctgtaacccaggcagatgtcagtagtaggaaacatcatgtagataatgacattgataaatttcatgcagaccacagcagtttatctgtgactccccagagaactactggagccctgcatacaccacctatagctttaagatcatcacaagtaatagtcaaagcaaactgtagcaaagatgacttccttttcaactgtaaaggaaatctaagtcctagtgttgaaaaggagtcacaaccagataacaaagtagaggctgtctctgtaaatcataatggaagagatatgtcagaatattttttaccgaatccttatctgtcagctctgtcttcatcttcaaaagatttagaaacaatagttactcttaagaagactatcagaatctcaccacacagggagagtgaccattctagtctaaataacaaatatttgaatggatgtggagaaatatcagtttcagaaatgaatgaaaagttgacaactctgtgttataggaagtataatgatgtctctgatctttgcaaattagaaaataaacaatattgtaggtggtccaagaaccaagatgacagttttacaatttgcaggaaacttacatatcctttagaaactctttgcaatagtccaaatagaagtacaaatacattgaaagaaatgccttggggacatatcaataacaacgtaacacagagctattctattggttatgaaggtagctatgatgcctctgctgatctctttgatgatattgctaaagaaatggacattgcaactgagattaccaaaaaatcacaggatattttgttaaaatggggaacatctttggcagaaagtcacccttcagagtctgatttttcactgagatcactttctgaagacttcatccagccttcacaaaaattatccttgcaaagcctatctgactctaggcattcaagaacatgctctccaacacctcattttcaatcagattcagaatataattttgaaaatagtcaagactttgttccatgttcacagtcaactccaatttcagggttccaccaaacaagaattcatgggataaacagagctttcaaaaaacctgtattttattcagatcttgatggtaactatgaaaaaataaggattttccctgaaaatgacaaacagcaagccagcccaagctgtcc

SEQ ID NO: 18326 - protein, 522 aa, Homo sapiens
MDKKSTAEKLGKELGLQAKELSAVHSSHHEIGVNDSNLFSLEMREPLESSNTKSFHSAVEIKNRSQHELPCFQHHGIDTPTSLQKRSACCPPSLLRLEETASSSQDGDPQIWDDLPFSESLNKFLAVLESEIAVTQADVSSRKHHVDNDIDKFHADHSSLSVTPQRTTGALHTPPIALRSSQVIVKANCSKDDFLFNCKGNLSPSVEKESQPDNKVEAVSVNHNGRDMSEYFLPNPYLSALSSSSKDLETIVTLKKTIRISPHRESDHSSLNNKYLNGCGEISVSEMNEKLTTLCYRKYNDVSDLCKLENKQYCRWSKNQDDSFTICRKLTYPLETLCNSPNRSTNTLKEMPWGHINNNVTQSYSIGYEGSYDASADLFDDIAKEMDIATEITKKSQDILLKWGTSLAESHPSESDFSLRSLSEDFIQPSQKLSLQSLSDSRHSRTCSPTPHFQSDSEYNFENSQDFVPCSQSTPISGFHQTRIHGINRAFKKPVFYSDLDGNYEKIRIFPENDKQQASPSC

SEQ ID NO: 18327 - DNA, 2176 bp, Homo sapiens
  CDS (147)..(1244)
atcatcaggaagtgcacaggcgtccggcgtgctcctccctccctgcagccccgggcagcatctcccagaggctccgcggcccaggctcctggtgtgtctgcagtgcaggtggctcctggaagaccctcagcctgcctgctgaggccatgtcggactacgagaacgatgacgagtgctggaacgtcctggagggcttccgggtgacgctcacctcggtcatcgacccctcacgcatcacaccttacctgcggcagtgcaaggtcctgaaccctgatgatgaggagcaggtgctcagcgaccccaacctggtcatccgcaaacggaaagtgggtgtgctcctggacatcctgcagcggaccggccacaagggctacgtggccttcctcgagagcctggagctctactacccgcagctgtacaagaaggtcacaggcaaggagccggcccgcgtcttctccatgatcatcgacgcgtccggggagtcaggcctgactcagctgctgatgactgaggtcatgaagctgcagaagaaggtgcaggacctgaccgcgctgctgagctccaaagatgacttcatcaaggagctgcgggtgaaggacagcctgctgcgcaagcaccaggagcgtgtgcagaggctcaaggaggagtgcgaggccggcagccgcgagctcaagcgctgcaaggaggagaactacgacctggccatgcgcctggcgcaccagagtgaggagaagggcgccgcgctcatgcggaaccgtgacctgcagctggagattgaccagctcaagcacagcctcatgaaggccgaggacgactgcaaggtggagcgcaagcacacgctgaagctcaggcacgccatggagcagcggcccagccaggagctgctgtgggagctgcagcaggagaaggccctgctccaggcccgggtgcaggagctggaggcctccgtccaggaggggaagctggacaggagcagcccctacatccaggtactggaggaggactggcggcaggcgctgcgggaccaccaggagcaggccaacaccatcttctccctgcgcaaggacctccgccagggcgaggcccgacgcctccggtgcatggaggagaaggagatgttcgagctgcagtgcctggcactacgtaaggactccaagatgtacaaggaccgcatcgaggccatcctgctgcagatggaggaggtcgccattgagcgggaccagagcacacaaatggaggggctgtgaccagcctccgcgcccagcggcttgacgtcctccggagcctctgcttggagttgggcggccgggccgagggcccagggcaagcttggggccctcactgagggtcggccttgtgctgtcccgtcaggccatagccacgcgggaggagctgcacgcacagcacgcccggggcctgcaggagaaggacgcgctgcgcaagcaggtgcgggagctgggcgagaaggcggatgagctgcagctgcaggtgttccagtgtgaggcgcagctactggccgtggagggcaggctcaggcggcagcagctggagacgctcgtcctgagctccgacctggaagatggctcacccaggaggtcccaggagctctcactcccccaggacctggaggacacccagctctcagacaaaggctgccttgccggcggggggagcccgaaacagccctttgcagctctgcaccaggagcaggttttgcggaacccccatgacgcaggcctgagcagcggggagccgcccgagaaggagcggcggcgcctcaaagagagttttgagaactaccgcaggaagcgcgccctcaggaagatgcagaaaggatggcggcagggggaggaggaccgggagaacaccacgggcagcgacaacaccgacactgagggctcctagccgcagcagacttccccgagccgtcgctgacttggcctggaacgaggaatctggtgccctgaaaggcccagccggactgccgggcattggggccgtttgttaagcggcactcattttgcggaggccatgcgggtgctcaccacccccatgcacacgccatctgtgtaacttcaggatctgttctgtttcaccatgtaacacacaatacatgcatgcattgtattagtgttagaaaacacagctgcgtaaataaacagcacgggtgacccgc

SEQ ID NO: 18328 - protein, 366 aa, Homo sapiens [sequence omitted]

SEQ ID NO: 18329 - DNA, 1604 bp, Homo sapiens
  CDS (25)..(1242)
atccaccgctgagctgggagaaagatggcggcagccgtgcgacaggatttggcccagctcatgaattcgagcggctctcataaagatctggctggcaagtatcgtcagatcctggaaaaagccattcagttatctggagcagaacaactagaagctttgaaagcttttgtggaagcaatggtaaatgagaatgtcagtctcgtgatctcgcggcagttgctgactgatttttgcacacatcttcctaacttgcctgatagcacagccaaagaaatctatcacttcaccttggaaaagatccagcctagagtcatttcatttgaggagcaggttgcttccataagacagcatcttgcatctatatatgagaaagaagaagattggagaaatgcagcccaagtgttggtgggaattcctttggaaacaggacaaaaacagtacaatgtagattataaactggagacttacttgaagattgctaggctatatctggaggatgatgatccagtccaggcagaggcttacataaatcgagcatcgttgcttcagaatgaatcaaccaatgaacaattacagatacattataaggtatgctatgcacgtgttcttgattatagaagaaaattcattgaagctgcacaaaggtacaatgagctctcttacaagacaatagtccacgaaagtgaaagactagaggccttaaaacatgctttgcactgtacgatcttagcatcagcagggcagcagcgttctcggatgctagctactctttttaaggatgaaaggtgccagcaacttgctgcctatgggatcctagagaaaatgtatctagataggatcatcagaggaaatcaacttcaagaatttgctgccatgctgatgcctcaccaaaaagcaactacagctgatggttccagcatcttggacagagctgttattgaacacaatttgttgtctgcaagcaaattatataataatattaccttcgaagaacttggagctcttttagagatccctgcagctaaggcggaaaagatagcatctcaaatgataaccgaaggacgtatgaatggatttattgaccagattgatggaatagttcattttgaaacacgagaagccctgccaacgtgggataagcagatccaatcactttgtttccaagtgaataaccttttggagaaaattagtcaaacagcaccagaatggacagcacaagccatggaagcccagatggctcagtgaatccttgcagaacttctgtgcacatgacatctttttccatgttgtgcagatcagtttcactatctccaaagcatttgcatcatgaccttatacatttcaatcccttttatgctggattccgtttaaagaagacattattagagcaggaagtacaagcatttaaaatatgtagttcccatatatttcagggtctctgtgtattaagctaactcagatgttttgaaagctttttctttaaacagaggtgaaatatctgtggctaaaaagtttgagatttgtgataactttgtagtcatgtaaaacttaagtgcttcatgcctctccaaatgtggttattctaataaatggagaaatgagcc

SEQ ID NO: 18330 - protein, 406 aa, Homo sapiens
MAAAVRQDLAQLMNSSGSHKDLAGKYRQILEKAIQLSGAEQLEALKAFVEAMVNENVSLVISRQLLTDFCTHLPNLPDSTAKEIYHFTLEKIQPRVISFEEQVASIRQHLASIYEKEEDWRNAAQVLVGIPLETGQKQYNVDYKLETYLKIARLYLEDDDPVQAEAYINRASLLQNESTNEQLQIHYKVCYARVLDYRRKFIEAAQRYNELSYKTIVHESERLEALKHALHCTILASAGQQRSRMLATLFKDERCQQLAAYGILEKMYLDRIIRGNQLQEFAAMLMPHQKATTADGSSILDRAVIEHNLLSASKLYNNITFEELGALLEIPAAKAEKIASQMITEGRMNGFIDQIDGIVHFETREALPTWDKQIQSLCFQVNNLLEKISQTAPEWTAQAMEAQMAQ

SEQ ID NO: 18331 - DNA, 1277 bp, Homo sapiens
agtctcgggcggggagtggagccacggtccccgccctgcagctcgccccgccctgctaatgggaccggccagcccgggaggcccctgacccttggggaagcccgctgggcgatggggaccctcgcctcccgccaagtgagctgtgaaccacgtcctgcgcaacctctcgctctccaaaactgtttgtaatatttaaacgatatttggcttaggagaatttcataaagttagccagatctcgggtctcaatttagactcggggtgctggggggcatagcatccctggagtacattggacagcaaaagtccaatcgttgcctgccgagtggacctgcagtgcttaaaccccgtcacccggctggcggggtcccaggccctggggtttctttcgcccgggagtccacgccctgatgctggggtggcccggtccccccgcgggtggctgggggcctggggctgcctcacacgacggtcccagcagggaatctctcgccgtcccgaccttcccggcccttggggagtcgcccggcaggttccggacccacccgcagaggaacccggcccacgcgcggcgcctttaaggcccctccactcgctccccagtcacgtgacctggccgtcgcttggcaacaggacgccgccgagtcccgcttctcctccaggcacaatggctgaggaatgccccagagcgtgcgcggagcctgtggcgcccaaggccacggccccgccggagaggaccagcgactactaccgcgtgagcgcggacctgccgggcaggttcaacaacccggggtggttccggggttacaggacccagaaggctgtctccgtgtacaggaccagtaaccaggcttacgggagcagagcccccaccgtgcacgagatgcctcgggtggaatgttccggaacaatactctcaatgtttacctggagaaaagcatcgtgactggccccgataactgcatcacctcctgtgaccggctcaacttccaccccagttacaacatcaacaggccatccatctgcgattgaggggctggaaactccctctaggagtcctctgaccccagggcctcctggaaaatcatcatccctcatcacccacagtcgcccgattgtgacggcacagactgcgctgccttccctgaaaatattattcgtctgcggagtaggaaaatatgcaaacggggccgtgaagtcctgccatttcacatctaataagtacatgggaaagatgctaatggttgactttgcattaaaaacgttgtcacatcctg

SEQ ID NO: 18332 - DNA, 1376 bp, Homo sapiens
  CDS (89)..(823)
aagcgcgggggagggagtgtaaatagagcgaaggctgctctgtgtcagccccgtcaccgccgggcggcccgcgcggagtctgagggagatggaagttgagcaagagcagcggcgcagaaaggtggaggccgggaggacgaagcttgctcacttccgacagagaaaaacaaaaggtgacagttcgcattcggagaaaaagacggcgaagaggaagggctcggctgtcgatgcgtctgtccaggaggagagtccggtaaccaaggaggacagcgcactctgtggaggaggggacatttgcaaaagcacattatgtgacgacacccctgatggggcaggaggggcctttgcagctcagccggaggactgtgatggagagaagagagaggacttggaacagctgcagcagaagcaagtcaatgaccatcctccagagcagtgtgggatgttcacagtcagtgaccacccaccagaacagcatgggatgttcacagtcggtgaccacccaccagaacagcgtgggatgttcacagtcagtgaccacccaccagaacagcgtgggatgttcacaatcagtgaccaccaaccggaacagcgtgggatgttcacagtcagtgaccacacaccagaacagcgtgggatcttcacaatcagtgaccacccagcagaacagcgtgggatgttcacaaaggagtgtgaacaagaatgtgaacttgccattactgacctggagagcggccgtgaagatgaggctggcctgcatcagagtcagaggccttttctccgccgcaggccgtgcatggccttgagctggaggcgctgcgcctgagtctgagcaacatgcacacggcgcagctggagctgacacaggccaacctccagaaggagaaggagacggcattgacggagctgcgggagatgctcaacagccggcgtgcccaggagctggccctgctacagagcaggcagcagcacgagctggagctcctcagggagcagcacgcacgggagaaggaggaggtggtgctcagctgagctgaaggagaagttacaatcagaaatggagaaaaacgcccagatagtaaagaccctgaaggaagattgggaatctgaaaaagatttatgtttagaaaatctacgcaaagaactgtctgcaaagcatcaatcagaaatggaggatttacaaaaccagtttcagaaagaattggcagaacagagagctgagttggagaagatttttcaagacaaaaaccaggctgaacgggcccttaggaacctggagagtcatcatcaagcagccattgagaagttacgtgaagacctgcagtccgagcacggccggtgtttagaagacttggagttcaagttcaaagagagcg

SEQ ID NO: 18333 - protein, 245 aa, Homo sapiens [sequence omitted]

SEQ ID NO: 18334 - DNA, 1394 bp, Homo sapiens
tatgcatgttttttgacagttgtagtcagaaagcagaattaagtttggggattagatcataatcccaaaacatacaatcacaaatgttgaaatcctgacatccaaattctggggaagtgattagtgtgttttgggttgcatgcaggatagttgcatcatgtcagttgtatcatgttaggcacaactattaccatgttattgtctttatttggaaattaaatatggcttaaggagatgcgtatgagtgccaagctgacaaggggtggacttgtggacctaattttaggtatcagcttgaccagattaaggaatatcagaaacctggtaaaacattgttttgttttacacattgagggtgtgtctatgagagtgtttccagaagagattagtgtataaatctgagtgtactaggtggagactatctgccctcaatgttggcgggcaccatccaatcagccagtggccaggagagaacaaatacttaagacaaaatgggctgggatcggtggctcatgcctgtaatcctagcactttggaaggtcgaggtgggtggatgacctgaggtcaggagttcgagaccagcctgaccaacatggcaaaaccctgtctctgctaaaaatacaaaaattagccaggcgtggtggtgcacacctgtggtcccggctacttgggaggctgagacaggagaattgcttgaacccaagaggcagaggtcgcagcagtgagccgagatcacgccactgtattcagcctgggtgataagctgagactctgtctcaaaaaaaaaaaaaaaaaacaaaaaaaaacaaaaaacaaaaaaacgcaaaatagcaaaacggactctctgggttctgctgcttggatatcagaaatctgactccatgaaagtgcattatcacaatactgactttgtgtataagcattgagtgtgtacataaaatgttgaaacttcctcgataaatgagatatccttttcgtacatctgcatttgtgaaagataaaatttcttgagatctcagctctttgggtgactgcatatgcagtggtgacccagcacagtttccatcaatctcatcaaaagacttgaggttgttgggcacagtatttcagatgaccagagttaaaaagctgggtatacacaattaacaaccaaagtgatatgcatttatacctttccctttatgaccaatttctttataaatatggctcatctgctcataactgttagacccacccaaatgttattagtaacctgagtgtttatgcttgcaaaaatgtatgttattattgtctgttttattatattaagtggtgtataaagtattctgttgtgtttttatgtttctcaaataagttcccctttaaaaaataaatatctttaagtttttaaaact

SEQ ID NO: 18335 - DNA, 1528 bp, Homo sapiens
  CDS (60)..(638)
gctccgggagagttagggctccgagccgagcgcgcggagcagctggggccggggcgcggatgctggaagttcacatcccgtcggtggggcccgaggccgaggggcccaggcagagcccggagaaaagccacatggtgttccgagtggaggtgctgtgcagcgggcgcagacacacggtgccaaggcgctacagcgagttccacgcgctgcacaagcggatcaagaagctgtacaaagtgcccgacttcccctcgaaacgcctgcccaactggaggaccagagggttggaacagcgccggcagggcttggaggcttacatccagggcatcctgtacctgaaccaggaggtgcccaaggagttactggaattcctgagacttcggcacttccccacagaccccaaggctagcaactggggcaccctgagggagttcctgcctggcgacagcagctcccagcagcaccagcggcctgtcctgagcttccatgtggatccctatgtttgcaacccctccccagagtcgctgcccaacgtggtggtgaatggtgtgctccagggcctctacagcttcagcatcagcccagataaagcccagccaaaggcggcctgtcaccctgctcctctgccactgatgccctgatcagtccagaggcctttggctgcctcctaagaaagtcatgtgcctctgtcctatgaactccatataaggctgggtcctcctttggcctggacccaggacttaattacccagtgcccagttgtgccacattcccactcaaggctcagaacttggctcgcattggtagctggaggtggtagaatttgtatgctcttagagcccaacagccaaggcagggtcaagaagataagtaataaaagaggaagtcagccaggcgcagtggctgatgcctgtaatcccagcactttgggaggccaagatgggtggatcacctgaggtcaggagttcgagaccagcctgaccaccatggagaaaccccgtctctactgaaaatacaaaattagccgggcattgtggtggtgcatgcctgtaaccccagctactcgggaagctgaggtaggagaatctctctttttttttttttttttttttttttggggcggagtttcactcttgttgcccaggctggaatgcagtggcacgatctcggctcacggcaacccccgcttcccgggttcaagcaattctcctgcctcagcctctcgagtggctgggattacaggcatccgccaccatgcccggctagtttttgtatttttaatagagacgggtttcaccacgttggccaggctggtcttgtactcctgacgtcaggtgatccacccgcctcggcttcccaaagtgctgggattacgggcgtgagccaccgtgctcggcccaaggcaggagaatctcttgaagccgggaggcggaagttgtggtgagccgagatcgcgccactgcactccagcctgggcaacaagagtgaaactccgtctcaaaataaataaataataaaggaagaagtc

SEQ ID NO: 18336 - protein, 193 aa, Homo sapiens
MLEVHIPSVGPEAEGPRQSPEKSHMVFRVEVLCSGRRHTVPRRYSEFHALHKRIKKLYKVPDFPSKRLPNWRTRGLEQRRQGLEAYIQGILYLNQEVPKELLEFLRLRHFPTDPKASNWGTLREFLPGDSSSQQHQRPVLSFHVDPYVCNPSPESLPNVVVNGVLQGLYSFSISPDKAQPKAACHPAPLPLMP

SEQ ID NO: 18337 - DNA, 1514 bp, Homo sapiens
  CDS (113)..(1276)
acggcggcgcatgctaggggattctgccgggtagaagagctgggcctggaacccagccctgaggacatcctgcggcccaggggcaagtgacacctgctgagagaggcccaggatggtggaggctgaggaactggcacagctgcggctgctcaatctggagctcctgaggcagctgtgggtggggcaggatgctgtgcggcggtcagtggccagggcagcctcggagtcaagcctggaatccagcagcagctacaactcagagactccatcgaccccagagacgtcctcaacttccttgagcacctcctgcccacggggccggtcctccgtgtggggcccaccagatgcctgtcgaggggacctccgtgatgtggccagatcgggggtggcctctctcccacctgccaagtgccagcaccaggagtccctgggccgaccgagaccccactcagcaccctcgctgggcacctcaagcctgagggacccagagccctcagggaggctgggtgatccaggaccccaggaggcacagaccccgaggtccatcctggctcaacagagcaagctgtccaagcccagggtgaccttctctgaggagtctgcagttcctgagaggagctggcgcctcaggccatacctgggctatgactggattgcagggtctctggacaccagctcttccatcaccagccagcctgaggccttcttctccaagctgcaggagtttcgggaaaccaacaaggaggagtgtatctgcagccatcctgaaccccagttgccaggcctgcgtgagagcagtggcagcggcgtggaggaagaccatgaatgcgtgtactgttaccgtgtcaaccggcgcctgttcccggtgcctgtggatcccggtaccccctgccgcctgtgcaggacaccgcgagaccagcagggccctgggaccctggcgcagccagcgcacgtcagggtgagcatcccgctgtcgatcctggagcccccgcaccggtaccacatccaccggcgaaagagctttgacgcctctgacacactggccctgccccggcactgcctgctgggctgggacatttttcctccgaagtctgagaaaagctcagcccccaggaacctggacctctggtcctctgtctccgctgaggcccagcaccagaagctgtccggcaccagcagcccttttcacccggcctcaccaatgcagatgctgcccccgaccccgacctggtcagtgccccaggtccctcggccccacgtcccacggcagaagccctgaggactgactcctgggggagaacagcattcccgccgcctccagcctctcccctctggcaggcgcacccaggagatggaatcccctgcccgcccagctcaggcccagctgtcctaggttgggcaggtgggtggacccaagcttgtctgctgcctgagttccagagagggaggaccctggggtggagggtgagggattctgtggaagtttgtaaataaagctcagtgctctgcagctc

SEQ ID NO: 18338 - protein, 388 aa, Homo sapiens
MVEAEELAQLRLLNLELLRQLWVGQDAVRRSVARAASESSLESSSSYNSETPSTPETSSTSLSTSCPRGRSSVWGPPDACRGDLRDVARSGVASLPPAKCQHQESLGRPRPHSAPSLGTSSLRDPEPSGRLGDPGPQEAQTPRSILAQQSKLSKPRVTFSEESAVPERSWRLRPYLGYDWIAGSLDTSSSITSQPEAFFSKLQEFRETNKEECICSHPEPQLPGLRESSGSGVEEDHECVYCYRVNRRLFPVPVDPGTPCRLCRTPRDQQGPGTLAQPAHVRVSIPLSILEPPHRYHIHRRKSFDASDTLALPRHCLLGWDIFPPKSEKSSAPRNLDLWSSVSAEAQHQKLSGTSSPFHPASPMQMLPPTPTWSVPQVPRPHVPRQKP

SEQ ID NO: 18339 - DNA, 1717 bp, Homo sapiens
  CDS (208)..(1389)
aacgccagcgcctgcgcactgagggcggcctggtcgtcgtctgcggcggcggcggcggctgaggagcccggctgaggcgccagtacccggcccggtccgcatttcgccttccggcttcggtttccctcggcccagcacgccccggccccgccccagccctcctgatccctcgcagcccggctccggccgcccgcctctgccgccgcaatgatgatgatggcgctgagcaagaccttcgggcagaagcccgtgaagttccagctggaggacgacggcgagttctacatgatcggctccgaggtgggaaactacctccgtatgttccgaggttctctgtacaagagatacccctcactctggaggcgactagccactgtggaagagaggaagaaaatagttgcatcgtcacatgatcacggatacacgactctagccaccagtgtgaccctgttaaaagcctcggaagtggaagagattctggatggcaacgatgagaagtacaaggctgtgtccatcagcacagagccccccacctacctcagggaacagaaggccaagaggaacagccagtgggtacccaccctgcccaacagctcccaccacttagatgccgtgccatgctccacaaccatcaacagggaccgcatgggccgagacaagaagagaaccttccccctttggtgtggatgcatcgctgcactcaccctccgtgctgattccgccttagttctccactttgatgaccatgacccagctgtgatccatgagaacgcatctcagcccgaggtgctggtccccatccggctggacatggagatcgatgggcagaagctgcgagacgccttcacctggaacatgaatgagaagttgatgacgcctgagatgttttcagaaatcctctgtgacgatctggatttgaacccgctgacgtttgtgccagccatcgcctctgccatcagacagcagatcgagtcctaccccacggacagcatcctggaggaccagtcagaccagcgcgtcatcatcaagctgaacatccatgtgggaaacatttccctggtggaccagtttgagtgggacatgtcagagaaggagaactcaccagagaagtttgccctgaagctgtgctcggagctggggttgggcggggagtttgtcaccaccatcgcatacagcatccggggacagctgagctggcatcagaagacctacgccttcagcgagaaccctctgcccacagtggagattgccatccggaacacgggcgatgcggaccagtggtgcccactgctggagactctgacagacgctgagatggagaagaagatccgcgaccaggacaggaacacgaggcggatgaggcgtcttgccaacacggccccggcctggtaaccagcccatcagcacacggctcccacggagcatctcagaagattgggccgcctctcctccatcttctggcaaggacagaggcgaggggacagcccagcgccatcctgaggatcgggtgggggtggagtgggggcttccaggtggcccttcccggcacacattccatttgttgagccccagtcctgccccccaccccaccctccctacccctccccagtctctggggtcaggaagaaaccttattttaggttgtgttttgtttttgtataggagccccaggcagggctagtaacagtttttaaataaaaggcaacaggtcatgttc

SEQ ID NO: 18340 - protein, 394 aa, Homo sapiens [sequence omitted]

SEQ ID NO: 18341 - DNA, 1702 bp, Homo sapiens
  CDS (26)..(862)
gataacagctcgatgtcctctggccatgactgaagaacttctccaagacctggctcagtataaaacacacaaggataagaatgtaatgatgtctgctagaactttgattcacctcttccgaacactgaatcctcagatgctgcagaagaaattccggggtaagcctacagaggcctccatagaagcaagagtacaagaatatggagaattagatgctaaagattacattccaggagcagaagttctggaagttgagaaagaagagaatgctgaaaatgatgaagatggatgggaaagtaccagtctcagtgaggaggaggatgctgatggtgaatggattgatgtgcaacactcttccgatgaagaacagcaagaaatctccaagaagctgaacagcatgcccatggaggagcggaaggccaaagctgcagccatcagcactagccgagttttaactcaggaagacttccagaaaatccgcatggcccaaatgagaaaagaacttgatgctgcccccgggaaatcccagaagaggaaatacattgaaatagacagtgatgaagagcccaggggtgaattactttctcttcgggacattgaacgccttcataaaaagccaaagtctgacaaagagacaagactagcaactgcaatggctggaaagacagaccgaaaagaatttgtgaggaagaaaaccaaaacaaatccattttccagttcgacaaataaagagaagaaaaaacagaagaactttatgatgatgcggtatagccagaatgtccggtcaaaaaataagcgttccttccgagaaaaacagttggcactacgagatgcacttttgaaaaagagaaaaagaatgaagtaacttcctggcaagttttccattcctagaagaatgctaagtttgtgtccttgctctgaaaattggtaaatcaagcatgtttgtttacattaaaaagtccagacacactgtattgtgaaaactgctgaacatgtggcagcaattttgtgtttttattttggagacggctaatggtaggaatgttaatgtaaatagtggtggtaatgtaaaatcatttcatttatcattcatgcaaaaaaaagtatgtattgagtgcctattcattgtcactgtagatgcaaaacgaatgagctgtaaccccttcactcaaggcattgacagcttagctgtgagggtggacacacatatgtgtatttacagtgcagtgtaaatagttctgtagtagaggttaactccatatttctgtgaggtcactgaggccttatggactaactctgtgaggataggagttatatattcttataagacaaaacaaaacaggacaatgttacaagagtaagaggttcttacttgtacataggctttcctgctgaaaacaggcccttgctgtacagattttgggtacataatttagctcttttagtcaatccaagagatttaagtgaccccccccccccgtgttttttttgtttttgtttttgttttgaatgccatgtaaaggctttttggttaagacctcacttttaaaactgccttaagtataaatagtacctttggaatatatttagttcatcatttgagctgccttcatactggtttcctcagccttccttcagcctgtaatattttcagcccactgtttaccttgtctcaataaaaggtttctaatgccaaatacgt

SEQ ID NO: 18342 - protein, 279 aa, Homo sapiens
MTEELLQDLAQYKTHKDKNVMMSARTLIHLFRTLNPQMLQKKFRGKPTEASIEARVQEYGELDAKDYIPGAEVLEVEKEENAENDEDGWESTSLSEEEDADGEWIDVQHSSDEEQQEISKKLNSMPMEERKAKAAAISTSRVLTQEDFQKIRMAQMRKELDAAPGKSQKRKYIEIDSDEEPRGELLSLRDIERLHKKPKSDKETRLATAMAGKTDRKEFVRKKTKTNPFSSSTNKEKKKQKNFMMMRYSQNVRSKNKRSFREKQLALRDALLKKRKRMK

SEQ ID NO: 18343 - DNA, 3510 bp, Homo sapiens
  CDS (134)..(2419)
gtgcaacggccgttagaggagctgagggagggaaccaccgctcaccgcagacgtagtggctgcagtcagtcttcccgagtgagggatttcgccgcccgctttcaggcccgtttggcttaaataactgtgattgatggccatgcaggagaaatatccaactgaggggatctctcacgtcacttcaccgagttccgatgtgattcagaagggcagttccctggggactgaatggcagaccccagttatctcggagccctttcggagccgcttcagccgctgttcaagtgtagccgacagtggggacacagccattggtacatcatgctcagatattgcggaggatttttgcagctcaagtggcagtcctcctttccagcccatcaaaagccacgtaaccattccaacagcccatgtgatgccttctactttagggacctctcctgccaagccaaattctacacctgttggaccctcttcctctaaactccctttgtcagggttggctgaaagtgtgggaatgacaagaaatggagacctcggtgcaatgaaacattctccaggcctatctagagatctcatgtatttctctggtgctactggagaaaatggaattgagcagtcctggtttccagcagtgggccatgaaagacaagaagaggcgaggaagtttgatattcctagcatggaatctaccctcaatcagtcggcaatgatggagacactttattcagatcctcaccaccgagtccgcttccacaacccaagaaccagcacaagtaaggagttgtacagagtgttgcctgaggccaagaaggcaccgggcagcggggcagtgtttgagcggaatggaccacattctaatagcagtggggtcctccctttgggactccagcctgctcccgggcactccagccagcctctgccctctcaggtgtggcagccgagtcctgacacttggcatccccgagagcaatcttgtgaactcagcacttgtcggcagcagctggaattgattcgtttacagatggagcaaatgcagcttcagaatggagccatctgccaccatcctgctgcttttggtccttcactgcccatcttagagccagcacagtggatcagcatcttgaacagtaatgaacaccttctgaaggaaaaagagcttctcattgacaagcagaggaaacacatctctcagctggagcagaaagtgcgagagagcgaactgcaagtccacagtgccctcttgggccgccctgccccctttggtgatgtctgcttgctgaggctacaggaattgcagcgagaaaacactttcttacgtgcacagtttgcacagaagacagaagccttgagcagagaaaagattgaccttgaaaagaaactctctgcttctgaagttgaagtccagctcatcagagagtcgctcaaagtggcgttgcagaagcattctgaggaagtgaagaaacaggaagaaagggtcaaaggtcgtgataaacatatcaataatttgaaaaagaaatgccagaaggaatcagagcagaaccgggagaagcagcagcgtattgagaccttggagcgctacctggctgacctgcccacactggaagaccatcagaagcagagccagcagcttaaggattctgagttgaagagcacagagctgcaggagaaagtgactgagctggagagtttgctggaggagacccaggcaatctgcagagagaaggagattcaactggaaagcctgaggcagagagaagcagaattctcctccgctggacatagcctgcaagataaacagtctgtggaggagaccagtggagaaggtccagaagtggaaatggagtcctggcagaagcgatacgattcgctccaaaagattgtggagaagcagcagcagaagatggatcagttgcgctcacaagtacagagcctagagcaggaagtggctcaagaagaaggaacaagccaggccctgagagaggaggcccagcgaagggattcagccctgcagcagctgcgcacagccgtgaaggagctttcagtgcaaaaccaggacttgattgagaagaatctgacactccaggaacacctgcgccaggcccaaccagggtctccaccttcaccagacacggcccagctggcacttgagctgcaccaggagttggccagttgccttcaagatctgcaggctgtctgtagcattgtgacccagagggcccagggccatgaccccaatctctccctgctcctgggcattcactcacagcacccagagactcagctagatttgcagaagccagatgtgatcaagaggaaactagaagaggttcaacagctgcgtcgtgacattgaggacttaaggaccaccatgtcagacagatatgcccaggacatgggagaaaactgtgtcacacagtgaggaattctgggggattcccccagggaggagctgggctgctgagagcctagtccagcaggtttctgccctgacattctcttgtctgctattcccagagaggtctcagaggggaggggagagcctgcatctgggggccaagggctgattagggaactgtgtcctacccacactggcatgttggattacgtttgtcctgttaattcactctcgacggtgagttactaattaacttttggcaggtacaacagataagtcctcacaaactgttcccagccctaggctgacatgagagacgaacaggctgtccacctttcttctccatccaatgggatggatccatgttcattcccacttcacaccttggtcctgctgattagagagctcatcagaggggcctggaaaggctgagcaagtaccagtgacaatggccatttaagaattctcaggccccatgtgccagccttcttgggaactgagctggctttctgggttttctcatgcctggtcttactgcttcttcctcagggctcttgttctcccagaagcctcagggtaatgtgttggttagcacgtaactactaggattggggccctagggattatagccaggactctaatctgcctaccatgccatttaacaagagatcccactctccagctgccttgtgtccctagggtcctggccatgtgtttagtgtgctaaactttctcctttgttctcaggccttccaggtagtccccttcctggacttaagagtgcaaactcttctctgtggttctagccttgggcagaattatatcccagagaccacagagcaactgtcaagctgcttaccccctcacccagggctacagcctgtgcccagccctctaatttgtgcctctcttgtgttgggggtggtgggggttattcctttccctttcctgctctggcctccttgaaagttcagagtacccagtacaagtcagccaccatgctgacgggtatttttcctcataaagtttataaccagttatttatatgaatctttgttatgtccatttgtttgtattgcgtattttgattataaaataaagtatcttaacag

SEQ ID NO: 18344 - protein, 762 aa, Homo sapiens
MAMQEKYPTEGISHVTSPSSDVIQKGSSLGTEWQTPVISEPFRSRFSRCSSVADSGDTAIGTSCSDIAEDFCSSSGSPPFQPIKSHVTIPTAHVMPSTLGTSPAKPNSTPVGPSSSKLPLSGLAESVGMTRNGDLGAMKHSPGLSRDLMYFSGATGENGIEQSWFPAVGHERQEEARKFDIPSMESTLNQSAMMETLYSDPHHRVRFHNPRTSTSKELYRVLPEAKKAPGSGAVFERNGPHSNSSGVLPLGLQPAPGHSSQPLPSQVWQPSPDTWHPREQSCELSTCRQQLELIRLQMEQMQLQNGAICHHPAAFGPSLPILEPAQWISILNSNEHLLKEKELLIDKQRKHISQLEQKVRESELQVHSALLGRPAPFGDVCLLRLQELQRENTFLRAQFAQKTEALSREKIDLEKKLSASEVEVQLIRESLKVALQKHSEEVKKQEERVKGRDKHINNLKKKCQKESEQNREKQQRIETLERYLADLPTLEDHQKQSQQLKDSELKSTELQEKVTELESLLEETQAICREKEIQLESLRQREAEFSSAGHSLQDKQSVEETSGEGPEVEMESWQKRYDSLQKIVEKQQQKMDQLRSQVQSLEQEVAQEEGTSQALREEAQRRDSALQQLRTAVKELSVQNQDLIEKNLTLQEHLRQAQPGSPPSPDTAQLALELHQELASCLQDLQAVCSIVTQRAQGHDPNLSLLLGIHSQHPETQLDLQKPDVIKRKLEEVQQLRRDIEDLRTTMSDRYAQDMGENCVTQ

SEQ ID NO: 18345 - DNA, 1783 bp, Homo sapiens
  CDS (252)..(1781)
atgcgccctccgtcccgcgctttgttgcgaaagcgagggggcgaggtgctgcggtgctagagcgcggcgcgaccggacgctgcgggcggggaagaggatggagactgtggcgtccgctgcaacggttggggctgcgcgtgagaaggtggcggtgtaggcacctgcgctcggggaaggctggcggcggcggccgagccatggcgggagacccccttctctgggctccctgaagtctcggggagccgtgacccatgggatcgttgagcagccgggtgctgcgccagccaagaccagcccttgcccagcaggcgcagggtgccagggcggggggctcggcccggaggccggacactggagacgatgcggcgggccacggattctgttactgtgcgggcagccacaagcgcaagcggagcagcgggtccttctgctactgtcaccctgactcggagacggacgaggatgaggaggagggggacgagcagcagcggctcctcaacacccctcgaaggaaaaaattaaagagtacatctaaatatatttatcaaacattatttttgaatggtgaaaacagtgacattaagatttgtgctctaggagaagaatggagcttacacaaaatatatttatgtcaatctggctacttttctagtatgttcagtggttcttggaaagaatccagcatgaatattattgaactggagattcctgaccagaacattgatgtaggagcactgcaggttgcatttggttcactgtatcgagatgatgtcttgataaagcccagtcgagttgttgccattttggcagcagcttgtttgctgcagttggacggtttaatacagcagtgtggtgagacaatgaaggaagcagttaatgtgaaaactgtatgtggctattacacatcagcagggacctatggattagattctgtaaagaaaaagtgccttgaatggcttctaaacaatttgatgactcaccagaatgttgaactttttaaagaactcagtataaatgtcatgaaacagctcattggttcatctaacttatttgtgatgcaagtggagatggatatatacactgctctaaaaaagtggatgttccttcaacttgtgccttcttggaatggatctttaaaacagcttttgacagaaacagatgtctggttttctaaacagaggaaagattttgaaggtatggcctttcttgaaactgaacaaggaaaaccatttgtgtcagtattcagacatttaaggttacaatatattatcagtgatctggcttctgcaagaattattgaacaagatgctgtagtaccttcagaatggctctcttctgtgtataaacagcagtggtttgctatgctgcgggcagaacaggacagtgaggtggggcctcaagaaatcaataaagaagaactagagggaaacagcatgaggtgtggtagaaagcttgccaaagatggtgaatactgctggcgttggacaggttttaacttcggcttcgacctacttgtaacttacaccaatcgatacatcattttcaaacgcaatacactgaatcagccatgtagcggatctgtcagtttacagcctcgaaggagcatagcatttagattacgtttggcttcttttgatagtagtggaaaactaatatgtagtagaacaactggctatcaaatacttacacttgaaaaggatcaggaacaagtggtgatgaacttggacagcaggcttctgatcttccctttatatatctgctgtaacttcttgtatatatcacc

SEQ ID NO: 18346 - protein, 510 aa, Homo sapiens
MGSLSSRVLRQPRPALAQQAQGARAGGSARRPDTGDDAAGHGFCYCAGSHKRKRSSGSFCYCHPDSETDEDEEEGDEQQRLLNTPRRKKLKSTSKYIYQTLFLNGENSDIKICALGEEWSLHKIYLCQSGYFSSMFSGSWKESSMNIIELEIPDQNIDVGALQVAFGSLYRDDVLIKPSRVVAILAAACLLQLDGLIQQCGETMKEAVNVKTVCGYYTSAGTYGLDSVKKKCLEWLLNNLMTHQNVELFKELSINVMKQLIGSSNLFVMQVEMDIYTALKKWMFLQLVPSWNGSLKQLLTETDVWFSKQRKDFEGMAFLETEQGKPFVSVFRHLRLQYIISDLASARIIEQDAVVPSEWLSSVYKQQWFAMLRAEQDSEVGPQEINKEELEGNSMRCGRKLAKDGEYCWRWTGFNFGFDLLVTYTNRYIIFKRNTLNQPCSGSVSLQPRRSIAFRLRLASFDSSGKLICSRTTGYQILTLEKDQEQVVMNLDSRLLIFPLYICCNFLYIS

SEQ ID NO: 18347 - DNA, 3046 bp, Homo sapiens
  CDS (290)..(1111)
aagagcagccattgtcccgcgcgcggacgcttgctgtcgccgagcagctcggcccttcagacttaacccccagcggccttgcggatgctgactaggagaggggaccgaactagcttaacccgagtcggccgtgttgcagaatcggggcagggggttgcctaacccgagttcgtcctgccgcagagccgtgctaggcactgaggcggtgacaggcccagcctgggctgcgggccagcggacgcccagtgcagctcaggacctcagcaccctgctgtgcctggaggagagcatggaagagcaggatgagaagcccccagagcccccgaaggcctgtgcacaggattctttccttcctcaagagattatcatcaaagtcgagggagaagacactgggtctctgaccatcccatctcaggaaggagtgaacttcaaaattgtgactgtggacttcacacgggaggaacagggtacttggaaccctgctcagaggaccctggacagagatgtgatcctggagaaccacagggacctagtctcttgggacttggcaactgcagttggaaaaaaagattcaacttcaaagcagaggatttttgatgaagaaccagctaatggagtgaagatagaaaggtttacaagggatgatccttggttatcttcatgtgaagaagtggatgattgtaaagaccagttggagaagcaacaggaaaaacaagagatacttttgcaggaagtggcattcactcaaaggaaagcagttattcatgagagagtctgcaaaagtgatgaaactggggagaagagtggtctgaattccagtctattttcatccccagttatacccataagaaaccattttcataaacatgtatcacatgctaaaaaatggcatcttaatgctgctgtaaacagtcatcagaagattaatgagaatgagacactatatgaaaataatgaatgtggaaaaccccctcagagcattcaccttattcagtttacaagaactcaaacaaaagataaatgctatggatttagtgaccgtactcaatctttttgccatggtacacccctacatatacatgaaaaaaattcatggaggaggaaaaacctttgattttaaagaatgtgggcaggttttgaaccccaaaatatcccataatgaacaacagagaattccttttgaagagagtcaatataaatgtagtgaaacctctcatagttcctcccttactcaaaacatgagaaataattctgaagagaaaccttttgaatgtaatcagtgtgggaaatccttcagctggagctcgcatcttgttgcacatcagagaactcacacaggggagaaaccttatgaatgtagtgaatgtggaaaatccttcagccggagctcgcaccttgtttcccatcagagaactcatactggagagaaaccttacaggtgtaatcaatgtgggaaatcctttagccagagttatgtccttgttgtgcatcaaagaactcatactggggagaagccttatgaatgcaatcaatgtggaaagtcattcaggcagagctataaacttattgcacatcaaagaacacataccggagagaagccctatgaatgtaatcaatgtgggaaatcatttatccagagctataaacttattgcacatcaaagaattcatactggggaaaaaccctatgaatgcaatcagtgtgggaaatcctttagtcaaagttataaacttgttgctcatcagagaactcacacaggagaaaaaccctttgaatgtaatcagtgtgggaaatccttcagctggagctctcagcttgttgcacatcaaagaactcacactggagagaaaccgtatgaatgtagtgaatgtggaaaatcttttaaccgcagttctcaccttgttatgcatcagagaattcacactggggaaaaaccgtatgaatgtaattagtgtgggaaatccttcagccagagttatgttcttgttgtacatcagagaactcatactggagaaaagccctatgaatgcagtcaatgtgggaagtccttcagacagagttcatgccttactcaacatcagagaactcatactggagagaaaccatttgaatgtaatcagtgtggaaaaacatttagcttgagtgctcgacttattgtgcatcaaagaactcatactggagagaaaccctttacatgtattcagtgtggaaaagctttcattaatagctataaacttattaggcatcaggcaactcatactgaagagaaactctatgaatgtaactagtttgtaaatcagctgggatttcttcctttttatttcattcttttaaaaaatttattttaaggtagtacatgtagttggaagaactactataaaaacaatatatgtgggaaaacttccagccctctgttaattgtgtgtctcaaatttgttctggaaaagaaagggggaaagtctatgaacgacttttcaacctggcaattccatatacaatgttaaacttgattcttatgacatattcctatgaaaataataaatactggcacttttccttgcagaaagcactcagacctgaatcagagaaaatcatatgccaaagccaactgccagtgttagacctctttttccataaagagtaaatggaatgctaacactagtgggcttattgagaaaatttaaaggttgctgtagtgtttagaacttaggctggaaaaccatattttagtgcatcattttactacatgatcttccaattagatagcttgtaatctgttccttacagcacttgctgttgttacatgtgaagattttatgaattttaggaaagtgtctatgatatatagtgaaaagtgtgggaaaagaatatagaaataatattcacttctaaaaccattatgataaaatatttgtgtatggattagaatagaaagggattatggatgtatctattcaatttctcagtttatgttgggccttcctttttggaatgtacgctgttatgctatgataaatgatataatgagtaaaaattattcaaagcc

SEQ ID NO: 18348 - protein, 274 aa, Homo sapiens
MEEQDEKPPEPPKACAQDSFLPQEIIIKVEGEDTGSLTIPSQEGVNFKIVTVDFTREEQGTWNPAQRTLDRDVILENHRDLVSWDLATAVGKKDSTSKQRIFDEEPANGVKIERFTRDDPWLSSCEEVDDCKDQLEKQQEKQEILLQEVAFTQRKAVIHERVCKSDETGEKSGLNSSLFSSPVIPIRNHFHKHVSHAKKWHLNAAVNSHQKINENETLYENNECGKPPQSIHLIQFTRTQTKDKCYGFSDRTQSFCHGTPLHIHEKNSWRRKNL

SEQ ID NO: 18349 - DNA, 2606 bp, Homo sapiens
  CDS (166)..(1455)
gggtctgcgcaccttcccggcccagccggcgattcattcaaaaggcgcgcaggctgcgcggctgtccgggcgctcgccgagccgggccgcggcgccgagtcgaacggggagccgagctggagctgccgcggcgcagccaggccggcgaccaccaggggcctgaggatgaagccaagtctgctgtgccggcccctgtcctgcttccttatgctgctgccctggcctctcgccaccctgacatcaacaaccctttggcagtgcccacctggggaggagcccgacctggacccagggcagggcacattatgcaggccctgccccccaggcaccttctcagctgcatggggctccagcccatgccagccccatgcccgttgcagcctttggaggaggctggaggcccaggtgggcatggcaactcgagatacactctgtggagactgctggcctgggtggtttgggccttggggggttccccgcgttccatgtcaaccatgttcctgggcacctctgggtactcatggctgtgatgagtgggggcggcgggcccgacgtggcgtggaggtggcagcaggggccagcagcggtggtgagacacggcagcctgggaacggcacccgggcaggtggcccagaggagacagccgcccagtacgcggtcatcgccatcgtccctgtcttctgcctcatggggctgttgggcatcctggtgtgcaacctcctcgagcggaagggctaccactgcacggcgcacaaggaggtcgggcccggccctggaggtggaggcagtggaatcaaccctgcctaccggactgaggatgccaatgaggacaccattggggtcctggtgcgcttgatcacagagaagaaagagaatgctgcggccctggaggagctgctgaaagagtaccacagcaaacagctggtgcagacgagccacaggcctgtgtccaagctgccgccagcgcccccgaacgtgccacgcatctgcccgcaccgccaccatctccacaccgtgcagggcctggcctcgctctctggcccctgctgctcccgctgtagccagaagaagtggcccgaggtgctgctgtcccctgaggctgtagccgccactactcctgttcccagccttctgcctaacccgaccagggttcccaaggccggggccaaggcagggcgtcagggcgagatcaccatcttgtctgtgggcaggttccgcgtggctcgaattcctgagcagcggacaagttcaatggtgtctgaggtgaagaccatcacggaggctgggccctcgtggggtgatctccctgactccccacagcctggcctcccccctgagcagcaggccctgctaggaagtggcggaagccgtacaaagtggctgaagcccccagcagagaacaaggccgaggagaaccgctatgtggtccggctaagtgagagcaacctggtcatctgaggggcggtctagtctaaggacactgcggccctgccctgggaggttccgaaggcttcctggaggaggtggagctgcagctgggactgtgaggaccgagaagcaatggcccagcagacgagacagcaaagaccaaggcctggaggtgggagcgtctgccccagtgaggaggcaggtggccggcgggcactgtgtacaggagcaggctgagccccgcccctggccctgctgccatgttgctcccctgaaggatgccccgacccccgtgcctgccctggctggatcctaggagcccacgggattctctgtatcatcagaggctgggcttggcagaggggaggggcctgtgcccgtcacccctggccccattccttggtaattagccacacccttgcctctgtacagggccctagagcagatgtgcgtccccctcctcttccagcaggtctataaagggaaggggtagcagaaagtcctgggctaggagagtgagtccctgggttctaatcttgggcacatctgtggccatcgctgggtccatttttctgactgtgaagtaaggagagacgtctcagtacccagggcctcttcagctctttgtaggttctgggctgggttgtgggggactggggagctgggctctaccatccctcccattagtagctttatccagccccgtttttgctgcttccagggcctctgccttcaaggcccccatggggctgtccatccatggctctgcctacggaaggggcttaatgcatgtgcctgcccctcccccagctgtttttaatgaaactgaaaaaatagacttgatcccagcaggactgtgatacagagccctagcctgcccagccagccccaagatctcaggagctttagggagaagacttggtggggctggagcacaccttgggcctcagtggtttctgtgtccctgtggtgccagtgcttctgggcagtgcaggcggctgccaggcccagccctgacttccactctggctcagcaacctggttatttatgtggggccgtgcaggcatgggcccactgcctgtccatcctgtttctcttatttattgaaactcaccattgccctatccttgtgtctccacccccttccatgtgttgaataataaaaggtgggaaagtg

SEQ ID NO: 18350 - protein, 430 aa, Homo sapiens
MKPSLLCRPLSCFLMLLPWPLATLTSTTLWQCPPGEEPDLDPGQGTLCRPCPPGTFSAAWGSSPCQPHARCSLWRRLEAQVGMATRDTLCGDCWPGWFGPWGVPRVPCQPCSWAPLGTHGCDEWGRRARRGVEVAAGASSGGETRQPGNGTRAGGPEETAAQYAVIAIVPVFCLMGLLGILVCNLLERKGYHCTAHKEVGPGPGGGGSGINPAYRTEDANEDTIGVLVRLITEKKENAAALEELLKEYHSKQLVQTSHRPVSKLPPAPPNVPRICPHRHHLHTVQGLASLSGPCCSRCSQKKWPEVLLSPEAVAATTPVPSLLPNPTRVPKAGAKAGRQGEITILSVGRFRVARIPEQRTSSMVSEVKTITEAGPSWGDLPDSPQPGLPPEQQALLGSGGSRTKWLKPPAENKAEENRYVVRLSESNLVI

SEQ ID NO: 18351 - DNA, 3562 bp, Homo sapiens
  CDS (33)..(1106)
aggctcggcggacctgctgattgggaaccgatatggcggcgactctgggcagcggggagcgctggacggaagcttacattgacgcagttagaagaaacaaatacccagaagacacacctcctgagagtcatgacccctgtggctgctgtaactgcatgaaggcacaaaaggaaaagaagtctgagaatgagtggactcagacccggcagggtgaggggaactccacgtacagtgaggaacagctgcttggggtacaaaggatcaagaaatgcagaaattactatgaaattctgggagtttctcgagatgctagtgacgaagagcttaagaaagcttacagaaaactcgccctgaaatttcaccctgacaagaactgtgctcctggagcaacagatgctttcaaagcaataggaaatgcatttgcagtcctgagcaatcctgataagagacttcgctatgatgaatacggagatgaacaggtgactttcactgcccctcgagccagaccttataattattacagggattttgaagctgacatcactccagaagagctgttcaacgtcttctttggaggacattttcctacaggaaatattcatatgttttcaaatgtgacagatgacacttactattaccgtcgacggcaccgacatgagaggacacagactcagaaggaggaggaagaagagaaacctcagactacatattctgcatttattcagctactcccagttcttgtgattgtgattatatctgtcattactcagctgctggctactaatcccccatatagtctgttctataaatcgaccttgggctacaccatttctagagaaactcagaacctgcaggtgccttactttgtggataaaaactttgacaaggcctacagaggagcttctctgcatgacttggagaaaacaatagagaaggattacattgattatatccagactagttgttggaaggagaaacaacaaaagtcagagctgacaaatttggcaggattatacagagatgaacgattgaaacagaaagcagagtcgctgaaacttgaaaactgtgagaaactttccaaactcattggcctacgcagaggtggctgagaggataatggtcctacgcagggctggggttttgctacttgttcctatttatgttcctgattccattttataatacaaaactaggtaatgatgaacactttactatttgctaacttcgttggttgggcagagtggcaggagcatgggcacgagagccagatgtgtcttcacaggatccttcctggggagtggctccagggaccaggagtagttcatctaagttaaattaatggcaaggcattggattccgtctccctgctccatgcctaccctgcctatgtgaatggagttcagggcatcccagagcagatccatgctttcttccttcttcccttcttcagtgaagtcttaagaaccaggcattcctaggcttagccaaagcttaatattagttatttacactgtctaccaagaattatacctctcccttcattagagtcatcatctccgccaagatttagcctttggaacatgttcctgcccagctttccattttctaggggaatatggagaaatttaaactattgtagtcaatagttttctattattccaatctctgctcagttagtagcattagcaaactgcctaatttgagattcctttatttccttaaccctctctcctttagagagtccagaaattaaaactactgagcagcatctggaggcgggggccagggcgaaggtataatgcaagaccgagcctcatctcctccacgaagcctccctactccatcatagaacccagagaatgtcccttcggtcatttcccctcagtatcatcattggtgtcatcgcacttaggctgagttcctacatcccacagaggcagatggtcagacccaggaggaggcattgccagctctccaggctgtttgctcaagcctagagatagaggagacagatcctctctccttggatatgggggtctagctttggccccagcagccactttgtttaacccagtatcctatagtttgtgatttgagatgatttttcattcattcaacatttattgagtgcctactataaaagcaggggctctcacacatattttcttacttaaacctcctcacaactctgaagtagatgtattatccctggttctatgaatgagaacattggcccagagaggatgacccaggtcttgtagtggcagagcaagacggtaggctgagtgtcaagtagaaagtgggagagcatcctcatgtctcaggtgattctagccagactggcaaagcagaacctttcccgaggatgcctccgtcctccccaaccccatgacccctcatcttttctgtggcaatcttgcatctgttcaggacaacatccctgctgctctttaggaagcaggaccctgtctaacataaattctgtacacaaaataagaggtccctcacaggcaggcagccctccactggtgactaggaagaattcagtcactgcctgggctgtgtggttctgggccttcctgtggagctgagctgcctgaattatcatgactctgaacttggaaggatcattaagtgactgtagcctacactccatgcttccttcatattggaagaaaagtttctggtagagagtcggccgggtgcactggctcaagcctgtaatcccagcactttgggaggctgtggcaggtggatcacctgaggtcaggagttcaagaccagcctggccaacacagtgaaaccccatctctactaataatacaaaaattagccaggtgtagtggcacatgcctgtagtcccagctactcaggaggctgaggcatgagaatcgctgcaacttgcaaggtggaggttacagtgagctgaaatcacgccactgcactccactccatctcaaaaaaaaaaagagtctacattaaacagattccaaagtaaagtttcttcatcccaatgcatggccatgatttacacagacgtgcctagcatggctcatcaacatctgaacggttgttccctaccatgcctctgcaggcattccacagagtcaggagatgggttcacaggtaaagattgggggctttagtggcttgtaggggacaactgctcagttgcagggagagggagcatttctagaaatagccagattttgctgcccaactagatctgtcctcctggttttagggggcccttcttgatcccctctgagtgactgagggaggttacattgtaaaatatgtccatgagccaaacaggcttatggaaagttcttctacacacaaaaaaatcaaagctctcctctccccatccccaaccactgctagaaaattggccataatgaaactgacttgacaggttaaaagaccctgtcctagatgcccaggaatcaggtagtcacacattttatggacttcatggcagcgatgagtaatctgtgatgatactaaatagaagcaataataactaactccattaaatgtcacgctgattgtctgtttttat

SEQ ID NO: 18352 - protein, 358 aa, Homo sapiens
MAATLGSGERWTEAYIDAVRRNKYPEDTPPESHDPCGCCNCMKAQKEKKSENEWTQTRQGEGNSTYSEEQLLGVQRIKKCRNYYEILGVSRDASDEELKKAYRKLALKFHPDKNCAPGATDAFKAIGNAFAVLSNPDKRLRYDEYGDEQVTFTAPRARPYNYYRDFEADITPEELFNVFFGGHFPTGNIHMFSNVTDDTYYYRRRHRHERTQTQKEEEEEKPQTTYSAFIQLLPVLVIVIISVITQLLATNPPYSLFYKSTLGYTISRETQNLQVPYFVDKNFDKAYRGASLHDLEKTIEKDYIDYIQTSCWKEKQQKSELTNLAGLYRDERLKQKAESLKLENCEKLSKLIGLRRGG

SEQ ID NO: 18353 - DNA, 2340 bp, Homo sapiens
  CDS (262)..(1110)
gaaagtaactccaggacgagaccggagcgacccgcgcagcgagcataggcggcgaagctgcgcccggcgcccgagaccggcagctgcgtggggcgggggctgcgcccgagcccgatctgccgctccggctccgagcagtggtctcggaaagagggtcgtggtcccgcacggatgcgcttgttgggagaaaccttggagattcacggcaaggcgtaaagcctggggcttccaacgatactctgggcagggatggaagcctagatgcctcaccgcaaggagcggccgagcgggtcctcgcttcacacacacggcagcaccggcaccgcggagggaggaaacatgtcccggctgtctctcacccggtcgcctgtgtctcccctggctgcccagggcatccccctgccagcccagctcaccaagtccaatgcacctgtgcacatcgatgtgggcggccacatgtacaccagcagcctggccacgctcaccaagtaccctgactccaggataagccgcctcttcaatggcactgaacccatcgtcctggacagtttgaagcaacattatttcattgaccgggatggggagattttccgctacgtcctgagcttcctgcggacgtccaagctgctgcttccggatgactttaaggacttcagtctgctgtacgaggaggcgcgctactatcagctccagcccatggtgcgcgagctggagcgctggcagcaggagcaggagcagcggcgccgcagccgggcctgtgactgcctggtggtgcgcgtcacgcccgacttgggcgagcggatcgcactcagcggcgagaaggccctcatcgaggaggtcttccccgagaccggagacgtcatgtgcaactccgtcaacgccggctggaaccaggaccccacgcacgtcatccgcttcccgctcaatggctactgccggctcaactcggtacaggtcctggagcggctgttccagaggggtttcagcgtggctgcgtcctgtgggggcggtgtggactcctcccagttcagcgagtatgtgctttgccgggaggagcggcggccgcagcccacccccactgctgttcgaatcaagcaggaacccctggactaggccctgcttcagtgcccacctgggcccccccagggacctggaaacagtgctggggagttctgcctgtgtatacttggccgtgggcatgagaccgagggtgaggctggagggtccaaagctggcccagcgagcaccagggtcccaggtgtcatggcaacagaacgtgggatgctggaggcatgcctgcagaaggactgttgatgcgacccaaagatacagcggtgggatctctgctgccagctctcccagcccctcagcttcgcagcctggcgcagcatcctctgaggccccggggcctgttggggcggggttggaagagccgtctgcagctacttcagaggagctgtttatccctctccacgcggggcagactctggcgggtctcctagcgtccgagagatggcttatttttctacagtatttaaaatggatgcagccctaactgcaaaagtcagagaggctgacaaggaccaatgcttctttatctggtgctcagttctcagtcagacgtgcagcatggctgcagggtggaccagctgcctggcattcaggcccagatgcctgcagggctggggctctcgggacagatgcagggatgtgtgctgcagggctgctgggaggagagtggtgggggcctgagggctgagtgattctgtaaccacctgagaccttcacgtttgctgccgttgggggctcaggctgcactccccgggtcacctgacctgctgcccaggggcttccagtcctgtctgtgtggactggcacctgggctgctggagaagtctcctcccgttcggaccagcctcagggctgcacgttacctcaggaatgggccccaccatgaaggggcccatctgtcagcagcgtcttctaggtccccagctcagggagccatccccagctccagttttctcatgcgaatatgcacagttttaattcacgttgttacactagcctgccgatgagacccagacacaggcagacctggcgctcttgacccctgattccagtgaggactggccctgaggagtccttgcagacctgctgcctgccccacgacaggcccaaagatggaccccccctggccttgtgacagctccccaagtgttctccggtggagaaactgcagaggactggtgggcggggctccccagccatcaccatcctgtgtacaatggctgtagacttgtatatggctcctttaatattgtaaagatgctgatgtac

SEQ ID NO: 18354 - protein, 283 aa, Homo sapiens
MPHRKERPSGSSLHTHGSTGTAEGGNMSRLSLTRSPVSPLAAQGIPLPAQLTKSNAPVHIDVGGHMYTSSLATLTKYPDSRISRLFNGTEPIVLDSLKQHYFIDRDGEIFRYVLSFLRTSKLLLPDDFKDFSLLYEEARYYQLQPMVRELERWQQEQEQRRRSRACDCLVVRVTPDLGERIALSGEKALIEEVFPETGDVMCNSVNAGWNQDPTHVIRFPLNGYCRLNSVQVLERLFQRGFSVAASCGGGVDSSQFSEYVLCREERRPQPTPTAVRIKQEPLD

SEQ ID NO: 18355 - DNA, 1887 bp, Homo sapiens
  CDS (1092)..(1679)
gaaaatgtttcctgttatttgctggacaagtcccaaagaacaggcagatgttcttattaaaagatcagcctataagattggtcaggaccaggcgcctctggccacgtgcctctcccctccagcacctgcggtctgcggtggcacctggcagctggaccacagccaggagaagggtactattagccctgcttcaaacatgcagaaactgaggcccggggagattaaataacctgcctgaaatgacagtgagtagctgcgcctggatttgagttctgctctggccaatccccaagctccacgctgtcagccaccccgctctcctacctcccagaggagcaggctacactcctgttccttttagagagagaaatattgcggccgggcgcggtggctcacgtctgtaatcccagcattttggcaggccaagggttttgccatgttcgtggggctggtctcaaactaattacctcagatgatccgcccacctcggcctcccaaagtgctgggattacagccgtcctgggccgccggacacccccgctggggccgatgcccaacagtgacatcgacttgagcaacctggagcggctggagaagtaccggagcttcgaccgctaccggcgccgggcagagcaggaggcgcaggccccgcactggtggcggacctaccgagagtatttcggggagaagacagagttccagctcctaaaatatttgctcctaaaatcttgaccacctgactttccggattgggatgccgttctgtgcgcctcaaatactctgtagatcccaaagagaagattgatattgggctgcctccacccaaagtctcccggacccaacagctactggaacggaaacaggccatccaggagcttcgggccaatgtggaagaggagcgggctgcccgcctccgcacagccagtgtcccgctggatgccgtgcgggccgagtgggagaggacctgtggcccctaccacaagcagcgtctggctgagtattacggcctctaccgagacctgttccacggtgccacctttgtgccccgagtccccctgcacgtggcctacgctgtgggtgaggatgacctgatgcctgtgtactgtggcaatgaggtgactccaaccgaggctgcccaagcgccagaggtgacctatgaggcagaagagggctccttgtggacgttgctactcactagcttggatgggcacctgctggagccagatgctgagtacctccactggctgctaaccaacatcccgggtaaccgggtggctgaaggacaggtgacgtgtccctacctcccccccttccctgcccgaggctccggcatccaccgtcttgccttcctgctcttcaagcaggaccagccgattgacttctctgaggacgcacgcccctcaccctgctatcagctggcccagcggaccttccgcacttttgatttctacaagaaacaccaagaaaccatgactccagccggcttgtccttcttccagtgccgctgggatgactccgtcacctacatcttccaccagcttctggacatgcgggagccggtgtttgagttcgtgcggccgcccccttaccaccccaagcagaagcgcttcccccaccggcagcccctgcgctacctggaccggtacagggacagtcatgagcccacctatggcatctactaaggagccagagtgtgcgcatttcagagcatgggattgatcggcagcaagagtaaagacacagctccagaggcccacactgtggggtctgggccctgccttaggcagcccccctctttggccccctcctgtcaggcccagggcttggagtgaaagtgactctcaggtggtggggtggggaatgtgaataaacatgatttcttgccgg

SEQ ID NO: 18356 - protein, 196 aa, Homo sapiens
MPVYCGNEVTPTEAAQAPEVTYEAEEGSLWTLLLTSLDGHLLEPDAEYLHWLLTNIPGNRVAEGQVTCPYLPPFPARGSGIHRLAFLLFKQDQPIDFSEDARPSPCYQLAQRTFRTFDFYKKHQETMTPAGLSFFQCRWDDSVTYIFHQLLDMREPVFEFVRPPPYHPKQKRFPHRQPLRYLDRYRDSHEPTYGIY

SEQ ID NO: 18357 - DNA, 2340 bp, Homo sapiens
aaatgaaatgttttgaaatatacttaaacaacaaactttgaagaaagtgttgttataaaattattgaagcgatttctatgtggaaataaatgtgaaaaataactatgatattttggtaaaatattcaccacttataatgcctcatcttaatagctaactcaggtttaatagtcttataaaaagtaatcagttaaatgattacttgcttataaatatctaaactagtccagttatgaaatcagtgtaatacattgatttttaaaactgctgctttttatgctttaaggaaaatgtatttcatatttgagtttaaaggaattgaaattacttcaggaaatgaatataaaataggttcacagttaaatgaataagcttttgtttatttgtgggtggagttattctccaattttttctgccatttttggctctagttcaggttttagcttgattagcaaaggtttttgacaaacagtttatgaaaaaataaaacttaaatacattacacgggttgtaaggacaaaggattttaaaatctgagcacttaggtgaagggacaagcaggtttatgtgtttaaacagaaagaagggaaaaggtactatgtgatatggtactgaaattttgatcccaatagaattcatttctcttacgttgaatccccaatcataattaagccgtatacacagattaaattaacagaagcatttcacataaatgttggtttcagtcatcaactacccatgaattcctgcccaaggatacttaatcaggattaaattttctatgaataattgaaaaacaaaacactcactggatttgttataatccgtgttggcactggattctaagtagttgccatcttgaatcctttgtaataaagccatacttttgtgtgtgtgtgtgatgccccagtattgagtatgctagctaaaaaatatcaagtgcctgattaaagaattgctaaatggttgtcaatactcgctgtataaaatgagtattcccattaatagtcactgattggaaattattctgttgctgtttgtcaagctgttcaggccttttcctttttacttctggcttattttaaaaatattttttatctatttactgtgtgtttaagcaagcaacagtgcactgatctggtagttaaattttttaattaaatagttaaaataatgtagtgcaacttaaaaatatctatggctttgtttttgtttttcttttgtacctagtctcattggaaatgactagtattctgcctcattttcagggcagaatatgtgtttgtgacccaaaatgacaaagttaccaagttcaacctgctcatttaatcatctctctattagttctttgtaaatcacttagtacattagagctacaggttaagactagaaagcctgagttatgttttaggtatacatgatcgtctgagtggtcataaccttttcttttatcatgtctcgctaataaccccagctattgtctgttgtgttcagctgagatgcaaaaaagaaattaagcaaaaaagaaaaaggtgaagacttttcatgaattttgtgaacttgccaaaaggggaagggagaaatctttgtgttacttcactcaaagaacataagtaactgcaattaacatatatgaaatttattactctgcttgcatttatgaaactaaccagttttttaaactttaattcttaaatttgtggttggaaatgctgataatttattttgttatttaagagctgttgttaagtggaggaaagtagttgttaataaatgtataaaactgttcttgactagtaatcagggacaaaatttatagttcataagtcatgacacagtattcgctctttttctgaatgtttacatagagattcatcactgcagattacagaaagttaagtgtatactacaaactctaattaaagataaaaatcttttctacttttctttgtcagataatgcttttttatgtgtttttacattttttgaaagaagataaatggttcatccagagctttattaagaagcatttcttttcttcccttaaaaaatagatgcttatttttattgacatgtgtataataagatgggtgcctactgtgatgcattttaccaggcattttaccttcattattactcatctctattgtgataaccaggctcccatttaactgagtataagagagaataaatgatttctctaaggtcatcaaactatttagtttttccactttaccttcatgatttaaggaacatgtattagctgtgttttagtgagaatgaattgctatccatcataatttttgctgttgatttgaacattaaaactggaattgtgct

SEQ ID NO: 18358 - DNA, 3168 bp, Homo sapiens
  CDS (6)..(1592)
acaagatgggctatgacacaccgttgcattttgcttgtaagtttggaaatgcagatgtagtcaacgtgctttcgtcacaccatttgattgtaaaaaactcaaggaataaatatgataaaacacctgaagatgtaatttgtgaaagaagcaaaaataaatctgtggaactgaaggagcggatcagagagtatttaaagggccactactacgtgcccctcctgagagcggaagagacttcttctccagtcatcggggagctgtggtccccagaccagacggctgaggcctctcacgtcagccgctatggaggcagccccagagacccggtactgaccctgagagccttcgcagggcccctgagtccagccaaggcagaagattttcgcaagctctggaaaactccacctcgagagaaagcaggcttccttcaccacgtcaagaagtcggacccggaaagaggctttgagagagtgggaagggagctagctcatgagctggggtatccctgggttgaatactgggaatttctgggctgttttgttgatctgtcttcccaggaaggcctgcaaagactagaagaatatctcacacagcaggaaataggcaaaaaggctcaacaagaaacaggagaacgggaagcctcctgccgagataaagccaccacgtctggcagcaattccatttccgtgagggcgtttctagatgaagatgacatgagcttggaagaaataaaaaatcggcaaaatgcagctcgaaataacagcccgcccacagtcggtgcttttggacatacgaggtgcagcgccttccccttggagcaggaggcagacctcatagaagccgccgagccgggaggtccacacagcagcagaaatgggctctgccatcctctgaatcacagcaggaccctggcgggcaagagaccaaaggccccccgtggggaggaagcccatctgccacctgtctcggatttgactgttgagtttgataaactgaatttgcaaaatataggacgtagcgtttccaagacaccagatgaaagtacaaaaactaaagatcagatcctgacttcaagaatcaatgcagtagaaagagacttgttagagccttctcccgcagaccaactcgggaatggccacaggaggacagaaagtgaaatgtcagccaggatcgctaaaatgtccttgagtcccagcagccccaggcacgaggatcagctcgaggtcaccagggaaccggccaggcggctcttcctttttggagaggagccatcaaaactcgatcaggatgttttggccgctcttgaatgtgcagacgtcgacccccatcagttcccggccgtgcacagatggaagagtgctgtcccgtgctactcaccctcggacagacagagttggcccagtcccgcggtgaaaggaaggttcaagtctcagctgccagatctcagtggccctcacagctacagtccggggagaaacagcgtggctggaagcaaccccgcaaagccaggcctgggcagtcctgggcgctacagccccgtgcacgggagccagctccgcaggatggcgcgcctggctgagcttgccgccctgtaggcttggcgctgggctctcggtttgttcttcatttttaaagaaggaagggtcatatgtttattgctaaactgtcaaaaaggaatatattctgattaaattattactcctcactttgagggtgtgagaattttagaagatttaaatgttctatataacacttagatttctgatattttggaagaagttagaagttaatgaaagcaaactcagttaccaattttctggaaaatatccatgtggtaatggtagactttttaggtggcaatttctaggtctgaaatatagcagaggaaagggcgctgaggcagttgcaggcaggcagccctgtacttaccctgtactcacctcatccgacagacgctgtggatgaggaggggcttggcggaggcgtgagcaccgatgtccctttgataacctgcactcaccaagatgaactatttgccgccctgtcttttcctgggttggggggtggcatctgatggtggcagagtgcctgttggttcgcccgtgggtctcatggttcagacagagggaggtggacggcagggatcagggagccaggagcgcgcctcagacttgcagcaaccattgtgatttgggttgttcggaatatttaaattactgatcagaagatgaaagtagcttttctcttgggaagtcttgcagcccgtgggagtgataccaggagcaacacagagctcagcagcggcgccaaggtgttccctgtttcctcagcacgtgagccttcaccgcctgcttcattcaggagccagtgcagcagtaatacagtctatacattgttctgttttcaaatttatcctgaggctttgttgagcataaatgattatacgataaaggtatccgttattttggaactcatttcagttgggatctcctgtatgcagagtgttgcatttagaggtttgagtcccatcttggtttcttgccgtgctgactgtagccttcaccttgacttgaatgaaggtctgtggttggaatgtgtgaggagccgctgaggtgttcaggaggtgctgcctggaggtcggtttcttcctgggtgttacgggcaactgctcacacagttgtttctctgtgaacatttccagtgtttaatccaaaatgaaaacccaccaatgcttttgctaacttcagtgccttttataaatcatttttaaatttcctgaacttgctttttgaggatatacagggatattaagtagacgcaggattgtttttgtttgtaaaaattctgaattgaaactttgttttaaaaaaaggcttctttctttcatatgacaagagataggtcaggaatattggaatcaagatttaaatgttaaaattcgattttgttacacagggtgtgttcatttgttttgtagcagacaagatctagatcccagacagaaacaacacatgctattctaaaaagccgcattttaaaaggcaccttggttctcaaaagaaatcagaatatggatattcgtagtgatgatctgttttctctaaaatcttaccatattgtctgtatatggttgtaaattcaaatggaaagtaaaacgttttggccctg

SEQ ID NO: 18359 - protein, 529 aa, Homo sapiens [sequence omitted]

SEQ ID NO: 18360 - DNA, 2106 bp, Homo sapiens
  CDS (62)..(907)
actgaaacccaagagcctagatgtgcggcaggaggagctgggggccgtggtcgacaaggagatggcggccacatccgcagccattgaagatgctgtgcggaggattgaggacatgatgaaccaggcacgccacgccagctcgggggtgaagctggaagtgaacgagaggatcctcaactcctgcacagacctgatgaaggctatccggctcctggtgacgacatccactagcctgcagaaggagatcgtggagagcggcaggggggcagccacgcagcaggaattttacgccaagaactcgcgctggaccgaaggcctcatctcggcctccaaggctgtgggctggggagccacacagctggtggaggcagctgacaaggtggtgcttcacacgggcaagtatgaggagctcatcgtctgctcccacgagatcgcagccagcacggcccagctggtggcggcctccaaggtgaaggccaacaagcacagcccccacctgagccgcctgcaggaatgttctcgcacagtcaatgagagggctgccaatgtggtggcctccaccaagtcaggccaggagcagattgaggacagagacaccatggatttctccggcctgtccctcatcaagctgaagaagcaggagatggagacgcaggtgcgtgtcctggagctggagaagacgctggaggctgaacgcatgcggctgggggagttgcggaagcaacactacgtgctggctggggcatcaggcagccctggagaggaggtggccatccggcccagcactgccccccgaagtgtaaccaccaagaaaccacccctggcccagaagcccagcgtggcccccagacaggaccaccagcttgacaaaaaggatggcatctacccagctcaactcgtgaactactaggccccccaggggtccagcagggtggctggtgacaggcctgggcctctgcaactgccctgacaggaccgagaggccttgcccctccacctggtgcccaagcctcccgccccaccgtctggatcaatgtcctcaaggcccctggcccttactgagcctgcagggtcctgggccatgtgggtggtgcttctggatgtgagtctcttatttatctgcagaaggaactttggggtgcagccaggacccggtaggcctgagcctcaactcttcagaaaatagtgtttttaatattcctcttcagaaaatagtgtttttaatattccgagctagagctcttcttcctacgtttgtagtcagcacactgggaaaccgggccagcgtggggctccctgccttctggactcctgaaggtcgtggatggatggaaggcacacagcccgtgccggctgatgggacgagggtcaggcatcctgtctgtggccttctggggcaccgattctaccaggccctccagctgcgtggtctccgcagaccaggctctgtgtgggctagaggaatgtcgcccatgactcctcaggcctggccctcgggcctccgtgatgggagccccccaggaggggtcagatgctggaaggggccgctttctggggagtgaggtgagacatagcggcccaggcgctgccttcactcctggagtttccatttccagctggaatctgcagccacccccatttcctgttttccattcccccgttctggccgcgccccactgcccacctgaaggggtggtttccagccctccggagagtgggcttggccctaggccctccagctcagccagaaaaagcccagaaacccaggtgctggaccagggccctcagggaggggaccctgcggctagagtgggctaggccctggctttgcccgtcagatttgaacgaatgtgtgtcccttgagcccaaggagagcggcaggaggggtgggaccaggctgggaggacagagccagcagctgccatgccctcctgctccccccaccccagtcctagccctttagcctttcaccctgtgctctggaaaggctaccaaatactggccaaggtcaggaggagcaaaaatgagccagcaccagcgccttggctttgtgttagcatttcctcctgaagtgttctgttggcaataaaatgcactttgactgtt

SEQ ID NO: 18361 - protein, 282 aa, Homo sapiens
MAATSAAIEDAVRRIEDMMNQARHASSGVKLEVNERILNSCTDLMKAIRLLVTTSTSLQKEIVESGRGAATQQEFYAKNSRWTEGLISASKAVGWGATQLVEAADKVVLHTGKYEELIVCSHEIAASTAQLVAASKVKANKHSPHLSRLQECSRTVNERAANVVASTKSGQEQIEDRDTMDFSGLSLIKLKKQEMETQVRVLELEKTLEAERMRLGELRKQHYVLAGASGSPGEEVAIRPSTAPRSVTTKKPPLAQKPSVAPRQDHQLDKKDGIYPAQLVNY

SEQ ID NO: 18362 - DNA, 3807 bp, Homo sapiens
  CDS (152)..(1006)
gacatctccgggaacccagcccaggccctgcctcccggacacaccgacgctcacgtagtcgcgcttgccacaaccctgcgggctctccgatgcggcgagcgagctggggagggggcttctccgcggcccaaaagcctgttcatctagccccatgatggctgtggacatcgagtacagatacaactgcatggctccttccttgcgccaagagaggtttgcctttaagatctcaccaaagcccagcaaaccactgaggccttgtattcagctgagcagcaagaatgaagccagtggaatggtggccccggctgtccaggagaagaaggtgaaaaagcgggtgtccttcgcagacaaccaggggctggccctgacaatggtcaaagtgttctcggaattcgatgacccgctagatatgccattcaacatcaccgagctcctagacaacattgtgagcttgacgacagcagagagcgagagctttgttctggatttttcccagccctctgcagattacttagactttagaaatcgacttcaggccgaccacgtctgccttgagaactgtgtgctcaaggacaaggccattgcaggcactgcgaaggttcagaacctcgcatttgagaagaccgtgaaaataaggatgacgttcgacacctggaagagctacacagactttccttgtcagtacgtgaaggacacttatgccggttcagacagggacacgttctccttcgacatcagtttgcccgagaagattcagtcttatgaaagaatggagtttgctgtgtactacgagtgcaatggacagacgtactgggacagcaacagaggcaagaactataggatcatccgggctgagttaaaatctacccagggaatgaccaagccccacagtggaccggatttgggaatatcctttgaccagttcggaagccctcggtgttcctatggtctgtttccagagtggccaagttacttaggatatgaaaagctagggccctactactagtgactgcaggtgacagggcgtggcggagctgccacagacaagcctagctctgctcactgtgcagtggagatggaaggccagggaggagcaacgtggaacttccatgaggccccgtttgggaaaataaaaggatcctcttcacttctttcttaaacagcaaatccagccaggttcagattacacaaccagtgtctcactcaaaggagcagtggtggctggcgcgctttcgcactgtggcagccacgagagtctgtgcacgtctgtgctggaaagggtatggatgggaatcaagcctatgccagtgctgatgaagctggaggagtctctcttctgctctccactcagatgtgggacatcagtcgccaaaagccactcagccccagccacctcgcgtgagaccctcactgttcattgtgttcatctttgggtgctctctgccagccaggcctttcctgcaagctgctgtgcttccccgtccacgtgtatctctgctgtgacacactgagctgacgcacatctccagtgcagctgcagaagagaaatgggattggctcttgttttctgcaagttcatgttttgcattttatgttcttccacaattgatctgatgttcaggaaaagataataaaggcaaattagttagtggttgagacaggcatttcctcctcccgcttcttgaccccacagatgtattccagcagagagcaacacaccagtcatcaaaacccactggctcctgtgcggtgtcacagattgcagggttctgacaaggcaggacagtcaagagtggggacactttcagcttctacttttgccttctagggggagctttctaagtccccacatttaccccgagtcaccggaaaaatctgatttttcccccgaaagctcaatgactttaacgtgcttggctggtttgtctcattctttatgaaagaattttggggccgggcgcggtggcttatgcctgtaatcccagcactttgggaggccgaggcaggtggatcacgaggtcaggagatcgagaccatcctggctaacacggtgaaaccctgtctctactaaaaatacaaaaaaattagccaggcgtggtggcgggcgcctgtagtcccagctacttgggaggctgaggcaggagaatggcgggaacctgggaggcggagcttacagtgaaccgagatcacaccactgcattcccgcctgggcagcagagcgagactccgtctcaaacagaaaaaaaaagagaattttgaatctcctttcccaaagagtcatcttttctgctgtgtttaggacatttgatttgcatatccaatatctcctcgaaaccttcagaaaatggttttatcgtgactgtgattcacactatctagaacactttaccagcacccagggacatggacttgggtgttcttatttatggtgtgtatgtaaagagataggggagaaaaacctcacccaagttcttatacgttattttaaacgtttgccaactctgaaatttcagagattcattgttcttaaccatattggactaaagtctgttggttagtgctgttgtaaaagagacctctggggccgagtgtggtggcttatgcctgtaatccctgcactttgggaagccaaggcgggcagctcacctgaggtcaggcgttcaagaccagcctggccaacatggtgaaacctcgtctgtactaaaaatacaaaatttagctgagtgtggtggcaggcgcctgtaatccagctactcgggaggctgaggcaggagaatcacttgaacccaggaggtggaggttgcagtgagccgagatcacgtcactgcatttcagcctgagcgacagagtgaaactgtctcaaaaaagagagacttccgggacagtcattatcagataggccccaaacctgtgatttttcttgggcaagattggtgtttacttaggggtgttttaaaaatatatttttacaagtatacttgtaggaagttggttttttattttctatttttgtttgtttttggagtttggttaaacgactcttttattttctgttttgccttatcttactaaagtgaagttttcctaaggcaagcaagaagaggagtggaagcacagttgcctggatttggaggcagagttgtcaggcttttcaagctaagagtcttgtgcttggattttccagattaatttgaaaagacctcccatttgtggctttgtacataaccaacaggcagatactgagtgccttggctcctagagttttgtggttgggttaggttgtttttgttgttgttttgttttggttttgttttcatttctgaagtttaagatgccttgactttttaaatgctcttaaggctattcgatgtaattcttactcctaaaactggctgttcttagcctgaaatctaatgctttgttttttgtacctctcccaggtgggtaacactctaggatgacatgatgttataattttaggggaaatcacatttttaccttatgctgttactgggcagaaccacgttttatgtaaacataccagacatcgggtaacagacagtactttaaatgttataaatttggtgatcagaactattaatagcataaatcgaactcaaatggaagcaaaactgatttcatgcaggtcctgaattttactttgccttaagaagtgccctccccacaatgcaggagaggcacagagtgcactgtcattgacatgttacccgactaaggatcactctgttcataagaaaaaggcctgaagtgactctgtttaataaagtcagtttaattttatct

SEQ ID NO: 18363 - protein, 285 aa, Homo sapiens
MMAVDIEYRYNCMAPSLRQERFAFKISPKPSKPLRPCIQLSSKNEASGMVAPAVQEKKVKKRVSFADNQGLALTMVKVFSEFDDPLDMPFNITELLDNIVSLTTAESESFVLDFSQPSADYLDFRNRLQADHVCLENCVLKDKAIAGTAKVQNLAFEKTVKIRMTFDTWKSYTDFPCQYVKDTYAGSDRDTFSFDISLPEKIQSYERMEFAVYYECNGQTYWDSNRGKNYRIIRAELKSTQGMTKPHSGPDLGISFDQFGSPRCSYGLFPEWPSYLGYEKLGPYY

SEQ ID NO: 18364 - DNA, 2937 bp, Homo sapiens
  CDS (251)..(2452)
agttaataggctggctgtcgcttggggttgctgcataaatgctaggagcagcagctctatggttatgaggtggggagaacggaatgacgtcatcgcttgggagctgctgcaggatggagtggaaagctgctgctgatggcattgtttttgtggcagcaagctgaatgacagatcctcactacaaagatacccctttggcccccgtgtaggcctccttggttcgggtgtttcaccatgccagcacagcgccatgagtcctggatgcatgctgctgtttgtgtttggctttgttggcggggcggtggtcattaattctgctatcttagtatctctctctgttttgctgcttgtgcacttttctatttctaccggtgtgccagctctgacgcagaacctaccaaggatactcagaaaagaacgccctatatcattaggaattttcccattacctgctggagatggattgcttacacctgatgctcagaaaggaggagagacccctggatctgagcaatggaaatttcaggaattaagtcaaccacgttctcataccagcctgaaggatgagctttctgatgttagccaaggcggatctaaagctaccactccagcatcaacagctaattcagatgtggcaacaattcctactgatactcccttaaaggaagaaaacgaaggatttgtgaaggttacagatgcgccaaataaatcagagataagcaaacacattgaagtacaggtagcccaggaaactagaaatgtatctactggctctgctgaaaatgaagaaaagtcagaagttcaagcaatcatcgaatctactcctgagctggatatggacaaagatctcagtggatataaaggttcaagcactcccaccaaaggcatagagaacaaagcttttgatcgcaatacagaatctctctttgaagaaagcagcaccttatctcagctccctggggataagtccaaagcctttgatttccttagtgaagaaactgaagctagtttagcctcacgcagagaacaaaagagagagcagtatcgtcaggtaaaagcacatgttcagaaggaagacggtagagtgcaggcttttggctggagtctgcctcagaagtacaaacaggtaaccaatggtcaaggtgaaaataagatgaaaaatttacctgtgcctgtctatctcagacctctggatgaaaaagatacatcaatgaagctgtggtgtgctgttggagtcaatttatctggtgggaagaccagagatggtggttctgttgttggagcaagtgtattttacaaggatgttgctggtttggatacagaaggcagtaaacagcgaagtgcctctcagagtagtttagataagttagatcaggaacttaaggaacagcagaaggagttaaaaaatcaagaagaattatccagtctagtttggatctgtaccagcactcattcggctacaaaagttcttattattgatgctgttcaacctggcaacatcctagacagtttcactgtttgcaactctcatgttctgtgcattgcaagtgtgccaggtgcacgagaaacagactaccctgcaggagaagatctttcagaatctggtcaggtagacaaagcatctttatgtggaagtatgacaagcaacagctcagcagagacagacagcctgttaggaggcatcacagtggttggttgttctgcagaaggtgtgacgggagctgccacttccccaagtacaaatggtgcttctccagtgatggataaaccaccagaaatggaagcagaaaatagtgaggttgatgaaaatgttccaacagcagaagaagcaactgaagctacagaagggaatgcggggtcagctgaagacacagtggacatctcccaaactggcgtctacacagagcatgtctttacagatcctttgggagttcagatcccagaagacctctccccagtgtatcagtcgagcaatgactcagatgcatataaagatcaaatatcagtactgccaaatgaacaagacttggtgagagaagaagcccagaaaatgagtagtcttttaccaactatgtggcttggagctcaaaatggctgtttgtatgtccattcatctgtagcccagtggaggaaatgtctccattccattaaacttaaagattcgattctcagtattgtacacgtgaagggaatcgtgttagtagccctggctgacggcacccttgcaatctttcacagaggagtggatgggcagtgggatttgtcaaactatcacctcttagaccttggacggcctcatcattccatccgttgcatgactgtggtacatgacaaagtctggtgtggctataggaacaaaatctatgtggtgcactccagcctgggtgacggagcaagaccctgtctcaaaacagacaaacaagcaaaaaatagattaaagtctggatttcactgattttcttgcttaataagttttttaaaaccacgatgctgcaattttttccctctcaagcttcttgaaaatgtgtgatttacccttttttatctattactctaggcaaagctaaatgtaattttatgtactgttttaacagtataaacctatgggataaaggcccccaatcatcagaaggactactgaaaagaaaagaaagcaaacgtagatgtcaaattgtctaaacattcttaagtaccactgatttttttttctggactattatacaaagatgtctgtaaaaagtataccagtggcttttatgcatatacacgattaggctagattgtgaagtacatgggatttcatgagccagaggaggcatttggatccattgggccacatgtgactataagcacattgtgtacacaataaaattgtagccactcatgtattaaaactgttttggtaaaagctgtattaaaagaataattttttgcttg

SEQ ID NO: 18365 - protein, 734 aa, Homo sapiens
MSPGCMLLFVFGFVGGAVVINSAILVSLSVLLLVHFSISTGVPALTQNLPRILRKERPISLGIFPLPAGDGLLTPDAQKGGETPGSEQWKFQELSQPRSHTSLKDELSDVSQGGSKATTPASTANSDVATIPTDTPLKEENEGFVKVTDAPNKSEISKHIEVQVAQETRNVSTGSAENEEKSEVQAIIESTPELDMDKDLSGYKGSSTPTKGIENKAFDRNTESLFEESSTLSQLPGDKSKAFDFLSEETEASLASRREQKREQYRQVKAHVQKEDGRVQAFGWSLPQKYKQVTNGQGENKMKNLPVPVYLRPLDEKDTSMKLWCAVGVNLSGGKTRDGGSVVGASVFYKDVAGLDTEGSKQRSASQSSLDKLDQELKEQQKELKNQEELSSLVWICTSTHSATKVLIIDAVQPGNILDSFTVCNSHVLCIASVPGARETDYPAGEDLSESGQVDKASLCGSMTSNSSAETDSLLGGITVVGCSAEGVTGAATSPSTNGASPVMDKPPEMEAENSEVDENVPTAEEATEATEGNAGSAEDTVDISQTGVYTEHVFTDPLGVQIPEDLSPVYQSSNDSDAYKDQISVLPNEQDLVREEAQKMSSLLPTMWLGAQNGCLYVHSSVAQWRKCLHSIKLKDSILSIVHVKGIVLVALADGTLAIFHRGVDGQWDLSNYHLLDLGRPHHSIRCMTVVHDKVWCGYRNKIYVVHSSLGDGARPCLKTDKQAKNRLKSGFH

SEQ ID NO: 18366 - DNA, 3812 bp, Homo sapiens
  CDS (239)..(1996)
tttccttttccttctctcctgagcgctcctgcagttcctggggcgtagtaggggatccacaagcgtttgtgaccagtgaagttctttacaagggtgagatctgcacgggaggacccgagcgagggtctcggcttgccaggaagccggggttccccgggaagcgtggagttcacccgcgcactcgaagtgcctttgcaaaattatatctgggtgttggcacccagccactattctgccaatgaagtacatcctggtcacgggtggggtcatctcaggcattggtaaagggatcattgccagcagcattggaacgattctaaaatcatgtggactccgagttactgccataaaaatcgacccctatattaacatcgatgctggcactttttcaccttatgaacacggtgaagtcttcgtcttaaatgatggtggagaagttgatttagaccttggaaattatgaaagatttttggatattaatctttataaagacaacaatatcaccacggggaagatatatcagcatgtgatcaataaagagaggcgtggtgattacctggggaaaacagtgcaagttgtccctcacattactgatgctgtccaggagtgggttatgaatcaagccaaggtgccggtggatggtaataaggaagagccccaaatatgcgttattgagctgggaggcaccattggagacatcgaaggaatgccgtttgtggaggcgtttagacaattccagtttaaggcgaaaagagagaatttctgtaatatccacgttagccttgtcccacagctcagtgctaccggagaacaaaaaaccaaacccacccaaaacagcgtccgcgcactgaggggtttaggcctgtctccagatctgattgtctgccgaagttcatcgcccattgagatggccgtgaaggagaagatttctatgttttgtcacgtgaaccctgaacaggtcatatgtatccatgatgtttcttccacataccgagttcctgtgcttttagaggaacaaagcattgtgaaatattttaaggagagattgcacctgcccatcggtgattctgcaagtaatttgctttttaagtggagaaatatggctgacaggtatgaaaggttacagaaaatatgctccatagccctggttggcaaatacaccaagctcagagactgctacgcctctgtgttcaaagccctggaacactcagccctggccatcaaccacaagttgaatctgatgtacatagactccattgatctggagaagatcactgaaaccgaggaccctgtgaaatttcatgaagcttggcagaagctatgcaaagctgatggtattcttgtgcctggaggctttggaatcagaggaacattgggaaaactccaggcgatttcttgggcaaggacaaagaagattccttttctgggagtttgtcttgggatgcaactagcagtgatagagtttgcaagaaactgccttaacttgaaagatgctgattccacagagtttaggccaaatgccccagttcctctggtgattgatatgcccgagcacaaccctggcaatttgggaggaacaatgagactgggaataagaagaactgttttcaaaactgaaaattcaatattaaggaaactttatggtgatgttccttttatagaagaaagacacagacatcggttcgaggtaaaccctaacctgatcaaacaatttgagcagaatgacttaagttttgtaggtcaggatgtcgatggagacaggatggaaatcattgaactggcaaatcatccttattttgttggtgtccagttccatcctgagttttcttctaggccgatgaagccttcccctccgtatctggggctgttacttgcagcaactgggaacctgaatgcctacttgcaacagggttgcaaactgtcttccagtgatagatacagtgatgccagtgatgacagcttttcagagccaaggatagctgagttggaaataagctgaaatgaatacatgactgggaataatggggactgcctgtgaggcctctgaaataattgaaggcaagatgaaggaactatctgaagaaatcactacactcttagagaatccctctgttctccagcaaacatgggatgtaaagcctcacagggaatctgataatacatacttctgtcaaccagaaccagaggggtagttttcttttccctccagaggcagcctttggtacttaaaatatctgtagctgattaaatttttcccaacaacctcactggggagaaagtgtgttcatgttttgtccagcggatcaggatgttaggatgacgagcaagagtccaggtcactgtgcctttgctgtgttgtatggaaaggatggcagggaacatgctgtaagtaattttgagtaagaaaatgagtcactgtgttacctggaactcagccacagatttgtgtgtggtccaagatcattgcagtttctcaccctgtttatttcctggtaaaagtaaaattgaataggtccaagacttgggggtggcaagtaaggctttgcctcaggcacaaaatttaagggggctccaaaaaactcaggaatcaagatcagcaatacagtctgagtatcccttatgtgaaatgcttggggctagaagtgttttgaatttcagattttggaatatttgcatatacatgcgatatcttggggatgagactcaagactaaacatgaaattcatttatgcttcatatacaccttatatacatagcctaaaggtaatttgatacaatattttaaataattttgtgcatgaaacaaagtttcgactgcattttgactgtgatttctggcatgagatcagttatggaattttccacttctagcgtcatgttggcattcagaaattttgaaattttggagcattttggattttcagattagggatgctcaacctgtatatatattttttaatcgacgtgaaattcacgtaacatagaattaaccattttgaagtgaacaatttggttgcattcactgatgttgagcaaccaccacctttaactatttccaaaacattttcatcactccaaaataaatgcctgtacacactagcagtcactccctatcttcccctccacctgtccgctggcaaccactgatctcctttttatttctgtggctttttctattctggatatttcatataagtggaattacacaatatatgtggtcttttgtgtctggcttcttctgagacagtaggaagggggcttggctttggctcacccccactagagcattttttcatgcattcccactgatcacaaaacccatactactacctcattgacaccatacctgctaacctcgaggctttagtcatacaaagaagatggcctttctgtattgttcttctgtgctctcataatgcttaaccatgtcttttacttaaacaattccaggaactggccttaggagatccaaatagggaaccaagattgcagagtgtcccatcttgggagggaatgctgaataattaattgatttacagccttgttgccgctggccagaccaccaggtggcccattactcgagatgatcatcacaaccagatgatgctaacctatatcctctacccttcgcgtgctttgtctgggaagtcttttggccccatgtcagtttctattgcattgagagcccaagagcccctggtcagtcaggcttccatttagcatggcgtttgcaaggtttacccatgttgtagcatgtgtcagaatttcattcctttctatggctgaataaaattccattgtatgaatatacc

SEQ ID NO: 18367 - protein, 586 aa, Homo sapiens [sequence omitted]

SEQ ID NO: 18368 - DNA, 1977 bp, Homo sapiens
  CDS (454)..(1800)
agtttcctcttggcctgaacttggctgacctccgcagcttccgcccgactctggctaaagtcttggaggctactgccttgaagatgacctctagggaccagcccagacccaagggcccccccgaaaagcacttcgccttgtcctgggatctcgaactctgagagctctccgacgctgaattatcagggcattctaaatcggctcaagcagttccccaggttttctcctcattttgctgcggagttggagagcatttactactcgctgcacaagatccagcaggatgtggcagaacatcacaagcagataggaaacgtcttacagattgtggagagctgcagccaactccagggtttccagtctgaggaggtctcacctgctgaaccagccagccctgggacgccccagcaggtgaaggacaagaccctgcaggagtcgagctttgaggacatcatggccaccaggtcctccgactggctccggcggcctttgggggaggacaatcagccggagacccagctgttctgggacaaggagccttggttttggcacgacactctgaccgagcaactctggcggatttttgccggcgtccacgatgagaaggcaaagcccagagacagacagcaggcaccaggcctggggcaggaaagcaaggcaccaggatcctgtgacccaggaacagacccatgtcctgaagatgcctccacccccaggccacctgaggcctcctccagtccccctgagggttcccaagacaggaacacaagttggggtgtggtccaggagcctcctggaagagcctctcggtttctacagtccatatcctgggaccctgaggactttgaagatgcatggaagaggccagatgccttgcccgggcagtcaaagagactcgccgtcccgtgcaaactggaaaagatgcggatcttggcacacggggagctcgtgctcgccacggccatcagcagcttcacgcggcacgtgttcacctgtggcagaagaggcatcaaggtgtggagcctgactggacaggtggctgaggacaggttccctgagagccacctgcctatacagacccctggggccttcctgcgcacctgcctgctgtcctcaaacagcaggagcctgctcaccggtggctacaacctggccagcgtgagcgtgtgggacctggcggcgccctccctgcatgtgaaggagcagttgccctgtgcaggtctcaactgccaggccctggatgccaacctggatgccaacctggccttcgccagcttcaccagtggtgtggtcaggatctgggacctgcgggatcagagtgtggtcagggacctcaagggttatcctgatggagtcaagagtatcgtggtcaagggctacaacatctggactgggggtccggatgcctgtctgcggtgctgggaccagaggaccatcatgaaacctctggagtaccaattcaagtctcagataatgagcctgtcccacagcccccaggaggactgggtgctgctgggcatggccaatggccagcagtggctgcaaagcaccagcgggagccagcggcacatggtggggcaaaaagacagcgtcatcctgagcgtcaagttctccccctttggccagtggtgggcaagcgttggaatggacgacttccttggcgtctacagcatgccggcggggacaaaagtgttcgaggtgcctgagatgtctccagtcacgtgctgtgacgtctcttccaacaaccgcctcgttgtcacaggctccggggagcacgcctccgtgtaccagatcacctactgaggggcctcgctgctgtcatcccactccggctcctcttttcatccccccccttccccccccccaacaagggggacatggtggagggaagcgggaaggctcttctgtggcatcgcacgatctagtctgtggtgtagactggtcgccatcacgtgtaataaagcacccgggaaaggc

SEQ ID NO: 18369 - protein, 449 aa, Homo sapiens
MATRSSDWLRRPLGEDNQPETQLFWDKEPWFWHDTLTEQLWRIFAGVHDEKAKPRDRQQAPGLGQESKAPGSCDPGTDPCPEDASTPRPPEASSSPPEGSQDRNTSWGVVQEPPGRASRFLQSISWDPEDFEDAWKRPDALPGQSKRLAVPCKLEKMRILAHGELVLATAISSFTRHVFTCGRRGIKVWSLTGQVAEDRFPESHLPIQTPGAFLRTCLLSSNSRSLLTGGYNLASVSVWDLAAPSLHVKEQLPCAGLNCQALDANLDANLAFASFTSGVVRIWDLRDQSVVRDLKGYPDGVKSIVVKGYNIWTGGPDACLRCWDQRTIMKPLEYQFKSQIMSLSHSPQEDWVLLGMANGQQWLQSTSGSQRHMVGQKDSVILSVKFSPFGQWWASVGMDDFLGVYSMPAGTKVFEVPEMSPVTCCDVSSNNRLVVTGSGEHASVYQITY

SEQ ID NO: 18370 - DNA, 2065 bp, Homo sapiens
  CDS (22)..(336)
ggaagtggatggcgtggagatatggcgcaactgcggcgcggacacttgacattcagggacgtggccatagaattctctcaggaggagtggaaatgcctggaccctgtgcagaaggctttatacagggatgtgatgttggagaactacaggaacctggtctccctgggaatctgtcttcctgacctgagtattatctccatgatgaagcaaaggacagagccctggactgtggagaatgaaatgaaagtagcaaaaaatccagataggtgggaaggtatcaaagatatcaacacagatggagtcctgttctgtcgcccaggctggagtacagtggtgtgatctcggctcactgcaacttccgcctcccagggaggagctgtgcagtgagaagcaaagcaggaaacaagcctattacaaatcaacttggattaacctttcagttacctctgccagaactggagatatttcaaggtgaagggaagatttatgaatgtaatcaagttcaaaagttcatcagccacagttcttcagtttcgccacttcaaagaatttactctggggtcaaaacccacatatttaataaacataggaatgattttgttgattttccattgctgtcacaagaacagaaagcacacattaggagaaaaccttacgaatgtaatgagcagggcaaagtcttcagagtgtcttcaagccttcctaatcatcaagtaatccacactgcagataaacctaacagatgtcatggatgtggtaaaaccgtcagggacaagtcaggcctcgcagaacattggagaattcgtacaggagagaaaccttacaaatgtaaagagtgtggcaagctcttcaatcgaattgcataccttgcacgacacgagaaagtgcatactggagagagtccttacaaatgtaatgagtgtggcaaggtcttcagtcgaattacataccttgtacgacatcagaaaattcatactagagagaaacctcataaatgtaacaaatgtggcaaggtttatagtagcagttcatacctagcacaacattggagaattcatacaggagagaaactttacaaatgtaataaatgtggcaaagaatttagtgggcattcaagcctcaccacccatctgttaatccacactggagagaaaccttacaaatgtaaagaatgtgacaaagcttttaggcacaagttctccctgacagttcatcagagaaatcataatggagagaaaccttataaatgtcatgaatgtggcaaagtcttcactcaagtttcacatcttgcacgacatcagaaaattcacactggagagaaaccttacaaatgtaatgagtgtggcaaagtcttcactcagaattcacaccttgcaaatcatcagagaatccacactggagagaaaccttacaaatgccatgtgtgtggtaaggtctttaggcacagttcatggtttgtacagcatcagagaagtgttcatgagagagtccttacaaactgagtttggcaaactctatcataagttctagcagtaatcaacatccgagagtctatactagaaagaaatcatttaaatgtactatatgtggcacaggctgtatcgagacctaccaaatcactagacatcgaaacattcatctttggtgaaaccacacaaatggattgtgtgtgccaaggccaacaagtcaaaatatgttgaacctaatgatatgatgtgtataaagggtgcaaggacacgtggaaatgatctgtaatattcgggttattaaaaatgtaattggctgggcgcagtggctcacacctgtaatcctagcactttgggaggttgaggcaggtggatcacaaggtcaggagtttgagaccagcctggccaatatggtgaaacaccatatctactataaatacaaaaaaattagccaggcgtggtggcacatgcctgcaatcccagctactcgggaggctgaggcaggagaattgcttgaatccaggaggcagaggttgttgcagtgagctgagatcgcgccactgcactccaacctgggtgacagagcgaggctccgtctc

SEQ ID NO: 18371 - protein, 105 aa, Homo sapiens
MAQLRRGHLTFRDVAIEFSQEEWKCLDPVQKALYRDVMLENYRNLVSLGICLPDLSIISMMKQRTEPWTVENEMKVAKNPDRWEGIKDINTDGVLFCRPGWSTVV

SEQ ID NO: 18372 - DNA, 1507 bp, Homo sapiens
  CDS (57)..(1217)
ggaggctgacgcgctagcgtggctctaagacgcgtcacccacgctgcgggcaagccatggcgggaagcgagccgcgcagcggaacaaactcgccgccgccgcccttcagcgactggggccgcctggaggcggccatcctcagcggctggaagaccttctggcagtcagtgagcaaggagagggtggcgcgtacgacctcacgggaggaggtggatgaggcggccagcaccctgacgcggctgccgattgatgtacagctatatattttgtcctttctttcacctcatgatctgtgtcagttgggaagtacaaatcattattggaatgaaactgtaagagatccaattctgtggagatactttttgttgagggatcttccttcttggtcttctgttgactggaagtctcttccagatctagaaatcttaaaaaagcctatatctgaggtcactgatggtgcattttttgactacatggcagtctatagaatgtgctgtccatacacaagaagagcttcaaaatccagccgtcctatgtatggagctgtcacttcttttttacactccctgatcattcagaatgaaccacgatttgctatgtttggaccaggtttggaagaattgaatacctctttggtgttgagcttgatgtcttcagaggaactttgcccaacagctggtttgcctcagaggcagattgatggtattggatcaggagtcaattttcagttgaacaaccaacataaattcaacattctaatcttatattcaactaccagaaaggaaagagatagagcaagggaagagcatacaagtgcagttaacaagatgttcagtcgacacaatgaaggtgatgatcaacaaggaagccggtacagtgtgattccacagattcaaaaagtgtgtgaagttgtagatgggttcatctatgttgcaaatgctgaagctcataaaagacatgaatggcaagatgaattttctcatattatggcaatgacagatccagcctttgggtcttcgggaagaccattgttggttttatcttgtatttctcaaggggatgtaaaaagaatgccctgtttttatttggctcatgagctgcgtctgaatcttctaaatcacccatggctggtccaggatacagaggctgaaactctgactggttttttgaatggcattgagtggattcttgaagaagtggaatctaagcgtgcaagatgattctcttttcagatcttgggaactgaaaccatttgaaatttattactaaggtcgtgatgtgaatatttgctcagtcagcccaccttgtcctgcctttttgcagataggctttcatttggacagctataactgctgtgttttttatattatttttactctttaccataaatcaattacaagaaaagagtttcagtcctagtatttagccccaaaatgaacctttaaacatttttttggtaatttttatattttctgtctttttaaaaatattaaattctggaaaaaac

SEQ ID NO: 18373 - protein, 387 aa, Homo sapiens [sequence omitted]

SEQ ID NO: 18374 - DNA, 1863 bp, Homo sapiens
gtaattagctgggctcagtggcacactcctgtagtcccagctacttgggaggctgaggtgggaggatcacttgaccccaggagttggaggctgctgtgagctatgatgacaccactgcactccagcctgggcaacagagtgagacccttggcatcatactcagatccttccaactgctaggatgaagcatacagacaagtgcccactctggatataggtgttggtgttctctttctgtttctatgggtccagtctgtgttcttttgtaagatgtctgggcaagccagaccaaagtctcctatttttacttgctgatcagggccatgaagaaaaatatttctaggcttcagatctctgtttacaatacccatgttatgtatgtaaaacacaccttccactaaatcttgaaaattttttgttgcaacactggccataaggacaggcaaacttgcccacacactcttggccctgtttgtttctctcagctagccagtcccacagctggagcttgcacacctgcatctggatgtgcagcatcaggtggtactgcacctcgatccccaacaagttgaagttttctttggaagattcctcagtggatgtgaaattctcctctaggagggaattacacctgagcagcaggggctgtttcacaattgaccaggtagacaaaccagccaggccattttcctggagctccagggatgattcatattcactggtgtctcttaagacggaattgatggtgtagttcacagcttgttgttctgattttgagtgtcagattctgcaaagggtttttcttttctgaggtgagctccgcgaagataatgggtgagctgctattttcaccatttttaacaccgtattggtatctgtctgcttggtcggagaacacttccagaaatggcaactgaacggaagctctgtctgcttgtggttggaccacttgaacatgttctgtccacgcagtgtgataacgaatgatattagggtgctgaagacctgccagcaccttcattccccgtagttctttcatgtaatgtgtttctgttgcacccttaatcaggattttttaaattgcataatactgaccatctaatttattcctgaccttgtatactcttccatatccaccttttcctaagatggcaagttcttcaaattcatttaagtaacgtgaagtttgtgcttcaaagggtacttcccttgatctgattttctggatatgagaaatagcctcacaaggatcctgatgaactctctctttagtggacctcattaagtgagtaatagctctgtggtgatgtagtctcaatgagctaaacttgtcacaagtgaaagaagacagcagccccattttgataaaggtctggcaaagtaacttaaacacctgtcttgaatgaactgggtttggttcacgcacatggctcaagtgcttcaccaaagaaataagcggcagctggtttgcaactgcaaaagggaaagttggctgttgtaggggttattttaatacctggagttctgctggaacataagtcatatttggagtccaggctcttggcggaaaagtcgatggcagatggcacagcaacagtctccaccccgtggccctcctctttgtgctcgtgggctgcagcgcagcccaccagcccacccagcaccacctctgagaattattcttctaataacgttattcttccttttgcattcagatatgcttaagaaattgtacagttccaagtagctcacttagaacacccatttgcatgtactaacataatgtaaatattaggcagtacagcattgttatttgaatattcattgaaatgtttaagtcctaaacacttccaaagcagattt

SEQ ID NO: 18375 - DNA, 3456 bp, Homo sapiens
  CDS (61)..(1791)
cttgaaaaaagcgaattcaaagatgaacccctacttttccgttttttttcggatgaggaaatggagggatcaaatatgaaacatcgacttatgaaacatgacttaaaagttgtggaaaatgttatagctaagtcattattgattaaatccaatgaaggcagctatggctttgggctagaagacaaaaataaagttccaataataaagttggtagaaaagggatctaatgctgagatggctggcatggaagtcgggaaaaagatttttgctattaatggtgacctagtttttatgagacctttcaatgaagtggattgcttcctgaaatcgtgtttaaacagcagaaaacctctaagagttcttgtgagcacaaagccaagagagacagtgaaaattccagattcagctgatggacttggcttccagatccggggatttggcccttctgttgtgcatgctgtaggaagaggaactgtggctgcagcagctggtcttcaccctggacagtgcattatcaaggtgaatggaatcaatgtcagcaaagagacacatgccagtgtcattgcacacgttacagcctgcaggaagtacaggcggccaacgaagcaagattccatacaatgggtttataatagcattgagagtgctcaagaagaccttcaaaaatctcactccaagccccctggagatgaagcaggggatgcttttgactgtaaagtagaagaggttattgacaaattcaacactatggccatcattgatgggaagaaggagcatgtgagtctgacagtggacaatgtccacctggaatatggtgtcgtgtatgagtacgacagcacagctggcatcaagtgcaatgtggtggaaaagatgattgagcccaaaggtttcttcagcttaactgccaagattcttgaagccctggctaaaagtgatgagcattttgtacaaaactgtaccagcctaaattctctaaatgaagtgattcctactgaccttcagagtaaattcagtgccctttgcagtgaaagaattgaacacctatgtcagagaatatccagttataaaaagttttctcgtgtactgaagaatagggcctggcctacttttaaacaggccaaatctaaaatctccccactgcacagcagtgatttctgccctaccaactgccatgtcaatgtgatggaagtttcttatcccaaaacatcaacctctttgggaagtgcatttggtgttcagttggatagcaggaagcataattctcatgataaagaaaacaaatcttcggagcaagggaaactgagccctatggtgtacattcagcacaccatcacaaccatggcggccccttcaggtctgtctctgggacagcaggatggccatggtctcaggtatctgctaaaagaagaagacttagaaacccaagacatctatcagaaactgctgggcaaacttcagactgcactgaaagaggtggagatgtgtgtttgtcaaatagatgaccttctgtcttcaataacatattctcctaaattagagcgtaagacatcagagggcataataccaacagacagtgacaatgtgaagggagaaagaaacagcaaacgggtatgttttaatgtagcaggagatgaacaggaagattctggtcatgacaccatcagcaacagagactcttacagtgactgcaacagcaataggaattccatcgcctccttcaccagcatctgcagcagccagtgcagctcgtatttcacagtgatgaaatggactcaggtgatgaacttcccttaagtgttcgcatatctcatgataaacaggacaagatacatagttgccttgagcatcttttcagccaggtggattcaattaccaatctcctaaaagggcaggctgttgtgagggcctttgaccaaaccaagtatctcactccaggccgaggattgcaagaatttcaacaggaaatggaaccaaagctgagttgtccaaaaaggctacggcttcatatcaagcaagatccttggaatcttcccagcagcgtccggactcttgctcagaacatcaggaaatttgttgaagaggtaaagtgtaggctactcctggctcttcttgaatattcagatagtgagacacagctccgtagagacatggttttccgccagactcttgtggccactgtctgtgccttctctgagcagctcatggcggccttgaaccagatgtttgacaacagcaaagaaaatgagatggaaacttgggaagccagcaggaggtggctggaccagatagcgaatgcaggtgttctttttcactttcagtcacttctgtcaccaaacttgacagatgaacaagccatgttagaagatacactggttgcactatttgatttggaaaaggtttccttttactttaaaccatcagaagaggaacctctggttgcaaatgttcctcttacatatcaagcagaaggaagtcggcaagctctgaaagtttacttctacattgatagttatcattttgaacaacttcctcaacggctgaaaaatggaggagggtttaaaattcatcctgttctttttgcacaagcactagagagcatggaaggatattattacagagacaatgtttctgtggaagaatttcaagctcagataaatgcagcctcactggaaaaggtcaaacagtacaaccagaagctcagggcattctacttggacaagtcaaattcaccaccaaactccacatccaaagctgcctatgtagataagctaatgaggcctctcaacgctttggatgaactttaccgactggtagcctcgtttatcagatccaagcgcacagctgcctgtgcaaacacagcttgcagtgcttctggggttggactgctgtcagtttcctcggagctgtgcaacaggctgggcgcctgccacatcatcatgtgcagcagcggtgtgcatcggtgcaccctgagcgtgacgctggagcaagccatcattctggccagaagccacggactgccacctcgttacatcatgcaggctacagatgtgatgcggaagcagggagcaagagttcagaacacagcgaagaatttgggagtcagagaccggactccacagtctgcaccaaggctgtacaagctgtgcgagccacctcccccagctggagaagaatgaaaagaactcccaagaaaccaggcaggcagaagctcctgaatgctggactagacaaactacatgctggctaaacattctccactgaagatacatcaatgcttttttttttttttctgtaaatctttcttcccattgcaaacaagtagtgatcagtttatactttgatatttatgctggaaatggatagaagttcaatcagacagttcagcttcacgaactgatgtctctctgtattgacattaagtattcacttttagagtaaaatccatccctgggacat

SEQ ID NO: 18376 - protein, 577 aa, Homo sapiens
MEGSNMKHRLMKHDLKVVENVIAKSLLIKSNEGSYGFGLEDKNKVPIIKLVEKGSNAEMAGMEVGKKIFAINGDLVFMRPFNEVDCFLKSCLNSRKPLRVLVSTKPRETVKIPDSADGLGFQIRGFGPSVVHAVGRGTVAAAAGLHPGQCIIKVNGINVSKETHASVIAHVTACRKYRRPTKQDSIQWVYNSIESAQEDLQKSHSKPPGDEAGDAFDCKVEEVIDKFNTMAIIDGKKEHVSLTVDNVHLEYGVVYEYDSTAGIKCNVVEKMIEPKGFFSLTAKILEALAKSDEHFVQNCTSLNSLNEVIPTDLQSKFSALCSERIEHLCQRISSYKKFSRVLKNRAWPTFKQAKSKISPLHSSDFCPTNCHVNVMEVSYPKTSTSLGSAFGVQLDSRKHNSHDKENKSSEQGKLSPMVYIQHTITTMAAPSGLSLGQQDGHGLRYLLKEEDLETQDIYQKLLGKLQTALKEVEMCVCQIDDLLSSITYSPKLERKTSEGIIPTDSDNVKGERNSKRVCFNVAGDEQEDSGHDTISNRDSYSDCNSNRNSIASFTSICSSQCSSYFTVMKWTQVMNFP

SEQ ID NO: 18377 - DNA, 2073 bp, Homo sapiens
tcataatgaacagtgagaactctcctactgggcttctggaatgttgggaccactctggtccaatgctactgtcgtttcctgtctggaaatgagagtagcttcttgaatattcttcctattcctactttggcttcttttaatctattcacaccattccatcagaaccacctgagggttttgtccaaaacacagctccgatcctgtcacgacctcttgctttaaagcccattagtagctttctgttgctcttgtgatagaaacaaaactccctgatacagcctacatggtcctgcattgtctggctcccacttccctttttcatttcttaccacactccttggcctctgcactagaggctcactggctgattgcaggcttgagaactgaccatgtttgtttctgccagaggcctttgcactgctgttttcttttcctggaatgtgcttccttccctatttagttaactcctagtcatcctttaatttattatttgagacggtcttgatctgtcacccaggctggagagcagtggcacgatcttgcctcactgcagcctcggcttcctgggctcaactgatcatcctcccacctcagcctcccaaagtgctgagattacaggcatgagccaccgtgcccggccagctcagtgaattttgtaaagcaatcatgttcatgtagctaccactcaattaaaaaagtactggccaggtgtggtgattcacatttgtaatccaagcactttgggaagctgaggcaggaggatcacttgaggccaggagtttgagaacagcctgggcaagatccttgtttccacaaaaaatttttaaaaaacccatctgagcttggtggtgtggacctgtggtcacagctactcaagaggcgttcttagcccaggagttcaagattacagtgagtgatcattgtactccagcctgggggacaaaagtgagaccctgtcttaaaaaacaaaaattaagataatacctaccagcaaaaaccagagggaagaatacttttaaaattagaggccgggtgcggtggctcacccctgtaatcccagcaccttgggaggcctaggtgggcagatcacctgaggtcaggtgttcaagaccaggctggtcagcatggtgaaaccctgtctctactaaaaatacacaaattagctgggtgtggtggcaggcgcctgtaatcccagctactcgggaagctgaggcagaagaatctcttgaacccgggaagcggaggttgtagtgaaccaagattatgccattgcactccagcctgggcgacagagtgagactttgtctaaaaagaatataaataatattagacagttgtcttatggagatacaatttacattttaaaaaaactcatagtttttttttttttttaggcagtcttgctctgtcacccaggctggaatgcagtggcgtgatctcggctcattgcaagctccacctcccgggttcacgccattctcctgcctcaacctcccaagtagctgggactacaggcatcccccaccacgcctggctaatttttttttgtatttttagtagagatggggtttcaccatgttagccaggatggtcttgatctcctgaccttgtgatctgcccacatcggcctcccaaagtgctgggattacaggcgtgagccaccacgcccggcaaacccatacattttaagtgtatacacagacaattccactctctgatcaaggtatacaacattactcttacctcaaagttcccttgttgccagtcaactctgcccttccctccagagtcagagcactattttgatttttttgtaatttagttttcctgaatctagaacttaaggaaacatacagtagatgtgtgtgggggcatgatcttaatataaaatactagatggaagactggaaatacagatcagactattataacaaaataacttggacattatattcctttaaaaaaactttgcccccaatccctaaagaatgttggttcttaaggaagctgaggcaggaggatcacttgaggccaggagtttgagaacagcctgggcaagatccttgtttccac

SEQ ID NO: 18378 - DNA, 1733 bp, Homo sapiens
gcaacctccacctcccgggctcaagcaattctcatgccccagcctcctgagtagctgggattacaggcgcccaccaccacgcctggctaattttttttgttttgtattgtttttttttttttttagtagagatgagatttcaccatgttggccaggctggtcttcaacttctgatcttagctgatccacctgcctcagcctcccaaagtgctgggattatacgcctgagccaccgcacccagcctcaaatcataaacttttttttgttttttgagacgaagtctcactctgttgcccaggctggagtgaagtgacacaatcttggctcactgcaagctccgcctcccaggttcaagcgattctcctgcctcagcctccccagtagctgggattacaggtgtgcgccactgcgcctggctaattttttgtatttccagtagagatggggtttcaccatgttggccaggctggtcttgaattcctgacctcaggtcatccacccacctcggcctcccaaagtgctgggattacagacatgagccactgtgctcagcctcaaatcataaactttttaaaggtttatccctgaccctctaaattaggttatgtgccttgttatatgctcttttagcacttatcctaattgtgattgtgtatttattatatgattgtttattcaacagtttctttcaacaaatatttaccaagtgtttagtaaatcttgttttggattgtaagcttcattaaggcagagtaaggactgggtctgtggtttctcttaccatgtgtacctagcacctagcacagtgcttagacatagggagtacttaataaatagtcattgaatgtatacattaaaatggcgttaataatgctgcctatctgatgaggctgttgtgagccttcaatgaaatcgtgtgtaggaagtgctagtttgctcacaggctggtggtaacagtctactgtggtcattgagagcagttattgtggacacaacccccagttctggtcaccccacccactagctctgtgaactcacataggtacttaatatctctgatttttattttatttatttgtaaaatggaactaataattacaaccaccttataggacagagtcttgctctgtcacccaggctggagtgcagtggtgtgatctcatctcactgcaacctccgcctcccaggctgaggcaggagaatggcatgaacccgggaggcggagcttgcagtgagcccagatcgtgctactgtactccagcctgggtgacagagcaagactacatctcaaaagaaaaaaaaaaaaaagtattattgagaatataatatagttaacctgaataggttaattatattgtggaacctaaaccgtataaatttaaaatgccttagaatgcccagtcagcaagtgacagtattagaaatcaacctggattttagaccgctgtgtgttcatggataatgtttgtgtgtttaggagactattctgaatagtggttcacagtcctttacatgcatcccctgtgcattggatgcttcactagccttttctgactaaagcatatgaaaatacaagtgaaaaaggcaagttattacaggaataacttttcattttctctaattttcatattttaaaaattcatttgtaagcatttgatactttaaacctgtttacaggaacttggtataaaccaccatgtccagcctgggtgacagagcaagactacatctc

SEQ ID NO: 18379 - DNA, 2552 bp, Homo sapiens
  CDS (100)..(2550)
ggaacggggcagtcccctgaggagcggggctggttgaaacgctaggggcgggatctggcggagtggaagaaccgcggcaggggccaagcctcctcaactatgacctcaaccggccaggattccaccacaaccaggcagcgaagaagtaggcagaacccccagtcgccccctcaggactccagtgtcacttcgaagcgaaatattaaaaagggagccgttccccgctctatccccaatctagcggaggtaaagaagaaaggcaaaatgaagaagctcggccaagcaatggaagaagacctaatcgtgggactgcaagggatggatctgaaccttgaggctgaagcactggctggcactggcttggtgttggatgagcagttaaatgaattccattgcctctgggatgacagcttcccggaaggccctgagcggctccatgccatcaaggagcaactgatccaggagggcctcctagatcgctgcgtgtcctttcaggcccggtttgctgaaaaggaagagctgatgttggttcacagcctagaatatattgatctgatggaaacaacccagtacatgaatgagggagaactccgtgtcctagcagacacctacgactcagtttatctgcatccgaactcatactcctgtgcctgcctggcctcaggctctgtcctcaggctggtggatgcggtcctgggggctgagatccggaatggcatggccatcattgggcctcctggacatcacgcccagcacagtcttatggatggctattgcatgttcaaccacgtggctgtggcagcccgctatgctcaacagaaacaccgcatccggagggtccttatcgtagattgggatgcgcaccacggtcaaggaacacagttcaccttcgaccaggaccccagtgtcctctatttctccatccaccgctacgagcagggtaggttctggccccacctgaaggcctctaactggtccaccacaggtttcggccaaggccaaggatataccatcaatgtgccttggaaccaggtggggatgcgggatgctgactacattgctgctttcctgcacgtcctgctgccagtcgccctcgagttccagcctcagctggtcctggtggctgctggatttgatgccccgcaaggggaccccaagggtgagatggccgccactccggcagggttcgcccagctaacccacctgctcatgggtctggcaggaggcaagctgatcctgtctctggagggtggctacaacctccgcgccctggctgaaggcgtcagtgcttcgctccacacccttctgggagacccttgccccatgctggagtcacctggtgccccctgccggagtgcccaggcttcagtttcctgtgctctggaagcccctgagcccttctgggaggttcttgtgagatcaactgagaccgtggagagggacaacatggaggaggacaatgtagaggagagcgaggaggaaggaccctgggagccccctgtgctcccaatcctgacatggccagtgctacagtctcgcacagggctggtctatgaccaaaatatgatgaatcactgcaacttgtgggacagccaccaccctgaggtaccccagcgcatcttgcggatcatgtgccgtctggaggagctgggccttgccgggcgctgcctcaccctgacaccgcgccctgccacagaggctgagctgctcacctgtcacagtgctgagtacgtgggtcatctccgggccacagagaaaatgaaaacccgggagctgcaccgtgagagttccaactttgactccatctatatctgccccagtaccttcgcctgtgcacagcttgccactggcgctgcctgccgcctggtggaggctgtgctctcaggagaggttctgaatggtgctgctgtggtgcgtcccccaggacaccacgcagagcaggatgcagcttgcggtttttgctttttcaactctgtggctgtggctgctcgccatgcccagactatcagtgggcatgccctacggatcctgattgtggattgggatgtccaccacggtaatggaactcagcacatgtttgaggatgaccccagtgtgctatatgtgtccctgcaccgctatgatcatggcaccttcttccccatgggggatgagggtgccagcagccagatcggccgggctgcgggcacaggcttcaccgtcaacgtggcatggaacgggccccgcatgggtgatgctgactacctagctgcctggcatcgcctggtgcttcccattgcctacgagtttaacccaaaactggtgctggtctcagctggctttgatgctgcacggggggatccgctggggggctgccaggtgtcacctgagggttatgcccacctcaccctgcccattgcctgcttgaggggcaccactactccagcccagaaggaaaggggggcagctcagtggccccaagagggagctgatatcatgaggataacattggcgggaggggagttaactggcaggcatggcaaggttgcatatgtaataaagtacaagctgtt

SEQ ID NO: 18380 - protein, 817 aa, Homo sapiens
MTSTGQDSTTTRQRRSRQNPQSPPQDSSVTSKRNIKKGAVPRSIPNLAEVKKKGKMKKLGQAMEEDLIVGLQGMDLNLEAEALAGTGLVLDEQLNEFHCLWDDSFPEGPERLHAIKEQLIQEGLLDRCVSFQARFAEKEELMLVHSLEYIDLMETTQYMNEGELRVLADTYDSVYLHPNSYSCACLASGSVLRLVDAVLGAEIRNGMAIIGPPGHHAQHSLMDGYCMFNHVAVAARYAQQKHRIRRVLIVDWDAHHGQGTQFTFDQDPSVLYFSIHRYEQGRFWPHLKASNWSTTGFGQGQGYTINVPWNQVGMRDADYIAAFLHVLLPVALEFQPQLVLVAAGFDAPQGDPKGEMAATPAGFAQLTHLLMGLAGGKLILSLEGGYNLRALAEGVSASLHTLLGDPCPMLESPGAPCRSAQASVSCALEAPEPFWEVLVRSTETVERDNMEEDNVEESEEEGPWEPPVLPILTWPVLQSRTGLVYDQNMMNHCNLWDSHHPEVPQRILRIMCRLEELGLAGRCLTLTPRPATEAELLTCHSAEYVGHLRATEKMKTRELHRESSNFDSIYICPSTFACAQLATGAACRLVEAVLSGEVLNGAAVVRPPGHHAEQDAACGFCFFNSVAVAARHAQTISGHALRILIVDWDVHHGNGTQHMFEDDPSVLYVSLHRYDHGTFFPMGDEGASSQIGRAAGTGFTVNVAWNGPRMGDADYLAAWHRLVLPIAYEFNPKLVLVSAGFDAARGDPLGGCQVSPEGYAHLTLPIACLRGTTTPAQKERGAAQWPQEGADIMRITLAGGELTGRHGKVAYVIKYKL

SEQ ID NO: 18381 - DNA, 1579 bp, Homo sapiens
  CDS (15)..(509)
gtcataaacaagccatgcaaggtttcaagctctacatgccacggggtcggtactggcggcttcgtctctgtcctgaacctcccagtgctcctagtgagtatgctggtttagtggtccgcaccgtactggagcctgtgttgcaaggattgcaagggttgccacctcaagcccaggcccctgcccttggtcaggctctgacggccatcgtgggtgcctggcttgaccacattcttacccatgggatttggttcagcctgcagggagcgctgcagctcaaacaagactttggagtggtcagggagttgctggaagaggagcagtggagcctgtcccctgatctccgccagaccctgctcatgctcagcatcttccagcagctggatggggccctgctgtgtctgttgcagcagcccctgcccaagtctcaagtccacaggaggcccccctgttgctgtgagttactccccttcgctcactgctttgtgtgtcccaaaccctattctcaccattaatctggcttcagtatatccccagcagccacctaccttccactcctgccttaccaggtgcttgtcaggaggtccagaccacgaaattgcccagcagctgcctcaatagcctggagagcttggagcccccgctccagcctggaacatctccagcccagacaggtcagctgcaaagcacactaggaggaaggggacctagcccggagggctacctggtgggaaatcagcaggcctggcttgccctcaggcaacaccagcgaccccgttggcacctgccgtttttttcctgcctgggaaccagtcctgaatcctaaggagcctgggaccaggagccagaaagttaagagctccccatctctagctggaaaatccagacatttggaattgcatattaaggaagcccagaactggaagcttggaggaaagcatactggagaataagctacaaagagcctgggcttaagaatccaagattaggggctgggcgaggtggctcacgcctgtaatccagcactttgggagaccgaggcaggcggatcatgaggtcaggagatcaagaccatcctggctaacacggtgaaaccctgtttccactaaaaatacaaaaaattagccgggcgtggtggcgggtgcctgtagtcccagctactcgggaggctgaggcaggagaatggtgtgaacctgggaggcggagcttgcagtgagctgagatccagccacagcactccagcctgggtgacagagcaagactctgtctcaaaaaaaaaaaaaaaaaaaatccaagattaggcagggcatggtggctcacacctataatcccagcactttgggaggctgaggcaggcggatcacctgaggtcgggagttccagaccagcctgaccaacatggagaaaccccgtctctactaaaaatacaaaattagccaggtgtggtggcgcatgcctgtaaccccagctactcaggaggctgaggcaggagaatcgcttgaacctaggaggcgaaggttgcggagagccgagattgtgccattgcactccagcctgggcaacaagggcaaaacttcgtctc

SEQ ID NO: 18382 - protein, 165 aa, Homo sapiens
MQGFKLYMPRGRYWRLRLCPEPPSAPSEYAGLVVRTVLEPVLQGLQGLPPQAQAPALGQALTAIVGAWLDHILTHGIWFSLQGALQLKQDFGVVRELLEEEQWSLSPDLRQTLLMLSIFQQLDGALLCLLQQPLPKSQVHRRPPCCCELLPFAHCFVCPKPYSHH

SEQ ID NO: 18383 - DNA, 1544 bp, Homo sapiens
  CDS (81)..(1394)
ggctcctcccccaccggccttcaccttttgttccctatcctgggccagttctctcgcaggtcccagatgtccagttccagatgcctggacccagagtgtgggggaaatatctctggagaagccctcactccaaaggctgtccaggcgcaatgtggtggctgcttctctggggagtcctccaggcttgcccaacccggggctccgtcctcttggcccaagagctaccccagcagctgacatcccccgggtacccagagccgtatggcaaaggccaagagagcagcacggacatcaaggctccagagggctttgctgtgaggctcgtcttccaggacttcgacctggggccgtcccaggactgtgcaggggactctgtcacaatctcattcgtcggttcggatccaagccagttctgtggtcagcaaggctcccctctgggcaggccccctggtcagagggagtttgtatcctcagggaggagtttgcggctgaccttccgcacacagccttcctcggagaacaagactgcccacctccacaagggcttcctggccctctaccaaaccgtggctgtgaactatagtcagcccatcagcgaggccagcaggggctctgaggccatcaacgcacctggagacaaccctgccaaggtccagaaccactgccaggagccctattatcaggccgcggcagcaggggcactcacctgtgcaaccccagggacctggaaagacagacaggatggggaggaggttcttcagtgtatgcctgtctgcggatggccagtcacccccattgcccagaatcagacgaccctcggttcttccagagccaagctgggcaacttcccctggcaagccttcaccagtatccacggccgtgggggcggggccctgctgggggacagatggatcctcactgctgcccacaccgtctaccccaaggacagtgtttctctcaggaagaaccagagtgtgaatgtgttcttgggccacacagccatagatgagatgctgaaactggggaaccaccctgtccaccgtgtcgttgtgcaccccgactaccgtcagaatgagtcccataactttagcggggacatcgccctcctggagctgcagcacagcatccccctgggccccaacgtcctcccggtctgtctgcccgataatgagaccctctaccgcagcggcttgttgggctacgtcagtgggtttggcatggagatgggctggctaactactgagctgaagtactcgaggctgcctgtagctcccagggaggcctgcaacgcctggctccaaaagagacagagacccgaggtgttttctgacaatatgttctgtgttggggatgaggcaggagaatcacttgaacctgggaggcggaggttgcagtgagctaagatcacgccactgcactccagcctgcggacagaccaagacttcatcccccccaaaaaaaaaagattggaggtgatttacagtgaaagacacaaataaaatacaactgttcaatggaaatagaaaataaacaccataaaagag

SEQ ID NO: 18384 - protein, 438 aa, Homo sapiens [sequence omitted]

SEQ ID NO: 18385 - DNA, 2922 bp, Homo sapiens
  CDS (131)..(1624)
ctcactaaatgcaggagaacgaggatgtttttgtcttgatttctcccacaatggaagaatattagcagcagcttgtgccagccgggatggatatccaattattttatatgaaattccttctggacgtttcatgagagaattgtgtggccacctcaatatcatttatgatctttcctggtcaaaagatgatcactacatccttacttcatcatctgatggcactgccaggatatggaaaaatgaaataaacaatacaaatactttcagagttttacctcatccttcttttgtttacacggctaaattccatccagctgtaagagagctagtagttacaggatgctatgattccatgatacggatatggaaagttgagatgagagaagattctgccatattggtccgacagtttgatgttcacaaaagttttatcaactcactttgttttgatactgaaggtcatcatatgtattcaggagattgtacaggggtgattgttgtttggaatacctatgtcaagattaatgatttggaacattcagtgcaccactggactataaataaggaaattaaagaaactgagtttaagggaattccaataagttatttggagattcatcccaatggaaaacgtttgttaatccataccaaagacagtactttgagaattatggatctccggatattagtagcaaggaagtttgtaggagcagcaaattatcgggagaagattcatagtactttgactccatgtgggacttttctgtttgctggaagtgaggatggtatagtgtatgtttggaacccagaaacaggagaacaagtagccatgtattctgacttgccattcaagtcacccattcgagacatttcttatcatccatttgaaaatatggttgcattctgtgcatttgggcaaaatgagccaattcttctgtatatttacgatttccatgttgcccagcaggaggctgaaatgttcaaacgctacaatggaacatttccattacctggaatacaccaaagtcaagatgccctatgtacctgtccaaaactaccccatcaaggctcttttcagattgatgaatttgtccacactgaaagttcttcaacgaagatgcagctagtaaaacagaggcttgaaactgtcacagaggtgatacgttcctgtgctgcaaaagtcaacaaaaatctctcatttacttcaccaccagcagtttcctcacaacagtctaagttaaagcagtcaaacatgctgaccgctcaagagattctacatcagtttggtttcactcagaccgggattatcagcatagaaagaaagccttgtaaccatcaggtagatacagcaccaacggtagtggctctttatgactacacagcgaatcgatcagatgaactaaccatccatcgcggagacattatccgagtgtttttcaaagataatgaagactggtggtatggcagcataggaaagggacaggaaggttatcttccagctaatcatgtggctagtgaaacactgtatcaagaactgcctcctgagataaaggagcgatcccctcctttaagccctgaggaaaaaactaaaatagaaaaatctccagctcctcaaaaggtaaaataaaacaaaacagctcacagagacacctccttcttccccctgcttctgcctccatgagtaactacctatatgacgtgctgctgctgagaccaaggaatgaatagtgccaaatcttgctgaagaatgatcttgcagaaatctgattgtgaagaaggaaatctaaaaaggccaaacaagcttcagtagagataacaccaggaaagcagttactcaaacaagactgaaagagaagcaatcaatcaataagaacaagtcccaggacttcagactaggctcagaatctatgacacattctgaaatgagaaaagaacagagccatgaggaccaaggacacataatggatacacggatgaggaagaacaagcaagcaggcagaaaagtcactctaatagagtgtgccagctgtcacttttctcaggagtggtcgatggagttgactgctaccttaaccagatttgccatcgttctgaaactgccgtgtgttttctaaggacaaccaggtgttaagcctttctctttagaagaaggacagtaacctttctgttaaagaattgaagaaaagttaagagctgcccaaatgcacagaggtgaaaatgacaaaccaaatggaatttctcttcagagttcagaattttcagatactaaggaggaagaaaggatccactacttcttgttcttatgaatgactctagaaaaatcagaatcaagttgtgggtggaaaaatcaacgtggcctttgagttcagttgttataaaccattgtgattattgttggtcaaagtattggtacttatattgttagtaattgcatcataattacattaccagtgttggaaaactaatgaagaaaacactgtaattgctactcagcaaatgtgaataaaaggtgtttgcgttattaggatgtctgttaagtaatcatttaatattattatattggtaatgtggttgtatgtgtgatgctatgcccagaatatgaagtatctgtttttgaaattcactttatttaaaagacaagcagctgactgggcacggtgcctcatgcctgtaatcctagcaccttgggaggctgaggcaggtggatcacctaaggtcaggagttcaacaacaccagcctgaccaacatggtgaaaccccatctctactaaaaatacaaaaatcagccgggtctcatggcaggcacctgtaatcccatctactgaggcaggagaattgcttgacccaggaggcagaggttgcagtgagccaagatcacgccattgcactccagcctgggggacagagcaagactctatctcc

SEQ ID NO: 18386 - protein, 498 aa, Homo sapiens [sequence omitted]

SEQ ID NO: 18387 - DNA, 3048 bp, Homo sapiens
  CDS (274)..(1452)
gcaataaacgaataccgaattaggtgtggaaagaaacccagccagaaagcaacagtgttaccagaagacataatcccctcagagagtagctctttgtctgacaccaccacctatgatgatcccagtgatgccttcacttttcctgggcagcgatcaagttcagtacctcattctccaagaattcttccccccaagtctcttggtattgagcgaatccatttcagaaagtcgtccatcaatgaacagtttgtggataccaggcagtccagagaaatgctgtccacacacagcagcccttacaaaactctggagaggcggccccagggaggacgaagcatgcccaccacgccagttcttacccgaaacgcctacagcagcagccacttggaacccgaatcttcatctcagcactgccgccagcggagtggaagcctggagtcccagtcccacctgctctccgagatggacagcgataagccatttttctccctctccaaatcccaaagaagcagcagcacagaaatcctcgatgacgggtcttcttatacaagccaatcaagcacagagtattactgtgtgacaccagttaccggcccctattacaccacccagaccctggacactcgcaccaggggtcggaggaggtcaaagaaacagaatgtttctacttcaaattcaggaagcatgcccaacctagcacaaaaggatagtttgaggaatggtgtttactcaaagagtcaggagccaccgtcttccagttactacattgccgggtacacaccctatgcagagtgtgacttttattacagtggtggttatgtctatgagaatgacaccgagggacagtatagtgtcaacccttcctaccggtcctcagcccactatggatatgagcgccagagggactacagcagatcctttcacgaagatgaggtcgaccgggtaccccataacccatatgcaactctccggctgccaaggaaggctgctgcaaaatcggagcacatcaccaaaaacatccacaaggccttagttgccgagcacttgcgtggctggtaccagcgggcctctgggcagaaggatcagggacacagcccgcagaccagctttgactcagacaggggatcacagagatgcctggggtttgcggggctgcaagtaccttgttctccaagcagtcgtgcatcctcgtactcttcagtgtcttctacaaatgcttctgggaactggaggacccagttaaccatagggctgtcggattacgagactccagcacattcttcttacaccagctgctatggcaatgtctataatcctttaccctctccaagcagacaatacacagaaatcagtcaactggatggtacagatggaaaccagctggaagacaacctggagagtagtgagcagagactcttttggcatgaagattcaaagcctggaacattagtctgaactgcagttggacctcctgaccaagcactgcgttctcacactagtgtgccttgcaaattgtatttgtcttccgagaggatgttcgttttagaaacctaaagacatcaaaggttgaagagaagacttagttgccctggaagtgaatcagtgaatcacacaccaagccccacaaagcccctaaaggaggatttggcctttcaaactctaggcactaacgtaactgtagggtctgcccacatgttgaagtattgccaagagaggactcagtgtgaagccttcatcaatagcaagcactttttaagggagtaaaagttgttaaaggcaaacctcaaaaacatgaaagggcattcaggatgtcccatggcaataagaacaggggaaatctcagagcacaattcagcaggatgagagaaggggaaccagaagctccggagtcattgctcacttcagagtttgaattcgtgagctgacaaagagtaacatgctctttctacacagacatggacaatttagacagtattggaaaattacttgaagctggattttcatgaagttctgaatgagtgtaaatgttttttaggatactataaagagtgatgtttttcataagcaccataaaatgggttctggaaaaactgattaccttagcatcctgtaatataacttatggtagcagattggggaaaatgaagcagcccactgaataattgacaaagtctgcttggagaacattctaaggtacaatatcatggagctcctttttcctttctccactaattgcgtgatgagctattgttctggctgttaattctccaactcggctgtcatttgaagtggcagacttaatatggaaagtttttataattatgagtttgaaaaagcattttaagatgatacagaaagtatccaaaacaacagaaaaaaaaagccacgtcattttagatgaattgcgtgccttaaaatggtgaacgttagaaaattaaacaagtctggattccacaagtagttccaagtcaccaagtgacaaaaacaaggttaacattaaaaaagaaaaacaacaacaacgacaaaaagctccaagctgcagtggatttaattatgaggctaaaactacctcatactttccttggaagaactaattagctatggtttattgtagggttttgtttgtttgttttttaaagcaaatgatttccatattccagattgatcttttttgtcatctttgcttcaaaattacataaaaggtgctcctttcccccttcttttatacaagtttcttgttcatattgtgaatagaaaagtttctgaacaacttttttggaacattttctatctatattccaaagcatgtaatatatacataaaaacgatttgttaaactggtccttagtcatttgtataattagaaatgaagtttgggaaaaaattttggaaaaaagacaagcaaaaaaaaataacttattccttttttgcatatttgtatagccttctagaatcagaaataacctttttgcatattcttttattgttctgacttttcaagacctattatttttttacataggtcaataaacaaaaggtgtgctactg

SEQ ID NO: 18388 - protein, 393 aa, Homo sapiens
MLSTHSSPYKTLERRPQGGRSMPTTPVLTRNAYSSSHLEPESSSQHCRQRSGSLESQSHLLSEMDSDKPFFSLSKSQRSSSTEILDDGSSYTSQSSTEYYCVTPVTGPYYTTQTLDTRTRGRRRSKKQNVSTSNSGSMPNLAQKDSLRNGVYSKSQEPPSSSYYIAGYTPYAECDFYYSGGYVYENDTEGQYSVNPSYRSSAHYGYERQRDYSRSFHEDEVDRVPHNPYATLRLPRKAAAKSEHITKNIHKALVAEHLRGWYQRASGQKDQGHSPQTSFDSDRGSQRCLGFAGLQVPCSPSSRASSYSSVSSTNASGNWRTQLTIGLSDYETPAHSSYTSCYGNVYNPLPSPSRQYTEISQLDGTDGNQLEDNLESSEQRLFWHEDSKPGTLV

SEQ ID NO: 18389 - DNA, 2069 bp, Homo sapiens
tctaaatgtcacctggccactgtccctcacctagtgctcaaccttggaaacccttttcctctgtgtctctttttaaagaaatttaataaattcttattgtctgtttggaatattcaacaatttaggctgggtgcggtggcccatgcctgtaatcccagtactttgggaggccaaaagagggtgggtcacctgaggtcaggagttagagagcagcctgaccaacatagtgaaaccatgtctctactaaaaatacaagaattagccaggcatggtggtgcatgcctgtaatcccagctactcgggaggctgaggcaggacaatcgcctcctgggttcacgccattctcctgcctcagcctcctgagtagctgggactacaggcgcccaccaccatgtccggctaatttttttgtatttttagtagagacagggtttcaccgtgttggccgggatggtctcgatctcctgacctcgtgatcaacccccctcagcctcccaaagtgctgggattacaggcataagccatcgtgcctggcccaccataggaatttatatactgacatatatataagatttttagctcagttctttttatgatacagttaccttatatgcccacttagtgaaatactatatggctattcacagtgatggctatgcagattatgtaatagaatagaaaatttatgcctatagtggtataagtgaaaaacataagctacacagttataataactaggtagaaaaacgcatagaaccaaaaagactggaagaaagaacaattagctttcaggtgccatttaccaattgttgggcatctttttttttaaaaatgatttattgtcaggcatcttttagcccaggtatcaaaatataaaattgaccaaggacttagtgtacatcctatatgtatatatatttttaatcgatttctatgcagatgtttctgcacacctgtccgtgatttgtccctccttcccacttgataactgtgtggcccacagaattctttgaccatagtgattggacttcagagtgaagaagtccagttgcttgtcagtaccttagtagtattaccagaatacccagtttttgctagggtatcatatgatgcaggagggcagttactagtaatgtttcttaggtaaattctttgagctgagagacaagttagagaattccctttggagatcaattaaatttaggcttagaaaagtagaagaaacagactttattacccattaagagttctctgagctaatcagtctggttaacaagttatagagatatgctagagggaatgtctcttgaagtccagggtagagttatggaccaagttgggagcagctaccgaggtcagtctgggaaggtaagctaaacagctaggctggttcactgcctgccagagatgtggttgaggatcaccatccacgttaacagggtgcatttcaagaaagtgaaagtgccactttgaattgctgctctttgacacatgtcaaagttcaggagaagggacatgctgtgcgtaggacatggggaagatagcagttgtaccaagaatgaatggaagaggaaggggagcaggaaaccttgactattcccccaggtgagaaagtggaattaggtcattgatacttggctggatctgccgggcccttactgaccctttgcccttcaacaggtgaccctgcccttagcatgagccactggatgttccatcagcaggccctgcaggagtacatcctgatgtgctgccagtgccctgcgggggggcttctggataaacctggcaagtgagtgttttctctctggggagggaggggagaggggaggagagagcagaggggcgtgcacctcaggcctactcagagccagatctcaagagcagaggtgtcaccttcagcacctgcatagcgctaggttgtatgggaaaaagcacccagttgggagcaccccttgaggccattgatcctggcacctccagctgcccgtcttgtcccccagcctgcatgcaaccccctcccccagacagggaaacagattgctgggtagataactcttctttttttt

SEQ ID NO: 18390 - DNA, 3026 bp, Homo sapiens
  CDS (58)..(1824)
tataaacccatatattcaccagttaccccagtaactcctggtacaccaggaaataccatgcactttgagaatatttcttccccagaaagttctccagaaataaagagacgcacttatagtcaagagggatatgacagatcttcaaccatgttaacattggggccttttagaaattctaatttaactgaactgggtctgcaagaaataaagactattggttatacgagccctaggagtaggactgaagtcaacaggcagtgtcctggagaaaaggaacctgtgtcagaccttcagctaggactcgatgcagttgagccaactgccctacataaaaccctggaaacgcctgcacatgacagggctgagcccaacagccaactggactcgactcactctggacggggcacaatgtattcttcctgggtaaagagccctgacagaacaggagttaacttctcagtgaactccaacttgagggacctgacaccctcgcatcagttggaggttggaggaggcttccgaataagtgagtcaaagtgcctgatgcaggatgatactagaggcatgtttatggaaacaactgtgttttgtacttccgaagatgggcttgtatctggtttcggacggactgttaatgacaatttgatcgacgggaattgcacaccccagaatccaccacaaaagaaaaaggtttctctattagaataccgtaagagacaacgtgaagctaggaaaagtggctctaagacagagaactttccactcattagtgtatcaccccatgcaagtggaagcttgagcaacaatggtgatggctgtgccagcagtaatgacaatggggagcaggtggaccacactgctagcctacctttaccaacaccagctacagtttataatgccacttctgaagaaactagcaataactgccctgttaaggatgctactgctagtgagaagaatgaaccagaagttcaatggactgcctcaacttcagtggaacaagtcagagaaaggagttatcagagagctttacttctcagtgatcaccgaaaagataaagatagtgggggagaatcaccatgtgtctcatgttcaccgagtcatgttcagtcttcaccttcatctcattcaaatcacataccccagttgcaagctaagggcccagtcccttctttcagtgaacttatggaagaccctgatcctgaaaatccagaacccacaactacgaatgaatgtccatccccagatacttctcaaaatacttgtaaaagtcctccaaaaatgagcaagcctggttcacctggatctgtaattcctgctcaagcacacgggaaaatattcacaaaaccagatccccaatgggactccacagttagtgcatccgaagctgaaaatggtgttcacctaaaaacagagctccaacaaaaacagctatcaaataacaaccaagcactttcaaagaatcatcctcctcagacacacgttcgtaattcatctgagcaactttcacaaaagctgccttctgtgccaacaaagttgcactgtcctccatcacctcacctagaaaatcctccaaagtcatccacgcctcacacacctgtacagcatggttatctttcaccaaagcctccttcacagcagttaggatctccctacaggcctcatcattcacagtcacctcaagttggaacacctcagcgagagcctcaaagaaacttttatccagcagcacagaaccttccagccaatactcagcaggcaacttctggaacattatttacacagacaccctcaggacaatcttcagcaacatacaaaatgaagtaggcatatttaccactcctaattttgatgaaacttccagtgctactacaatcagcacatctgaggatggaagttatggtactgatgtaaccaggtgcatatgtggttttacacatgatgatggatacatgatctgttgtgacaaatgcagcgtttggcaacatattgactgcatggggattgataggcagcatattcctgatacatatctatgtgaacgttgtcagcctaggaatttggataaagagagggcagtgctactacaacgccggaaaagggaaaatatgtcagatggtgataccagtgcaactgagagtggtgatgaggttcctgtggaattatatactgcatttcagcatactccaacatcaattactttaactgcttcaagagtttccaaagttaatgataaaagaaggaaaaaaagcggggagaaagaacaacacatttcaaaatgtaaaaaggcatttcgtgaaggatctaggaagtcatcaagagttaagggttcagctccagagattgatccttcatctgatggttcaaattttggatgggagacaaagatcaaagcatggatggatcgatatgaagaagcaaataacaaccagtatagtgagggtgttcagagggaggcacaaagaatagctctgagattaggcaatggaaatgacaaaaaagagatgaataaatccgatttgaataccaacaatttgctcttcaaacctcctgtagagagccatatacaaaagaataagaaaattcttaaatctgcaaaagatttgcctcctgatgcacttatcattgaatacagagggaagtttatgctgagagaacagtttgaagcaaatgggtatttctttaaaagaccatacccttttgtgttattctactctaaatttcatgggctagaaatgtgtgttgatgcaaggacttttgggaatgaggctcgattcatcaggcggtcttgtacacccaatgcagaggtgaggcatgaaattcaagatggaaccatacatctttatatttattctatacacagtattccaaagggaactgaaattactattgcctttgattttgactatggaaattgtaagtacaaggtggactgtgcatgcctcaaagaaaacccagagtgccctgttctaaaacgtagttctgaatccatggaaaatatcaatagtggttatgagaccagacgg

SEQ ID NO: 18391 - protein, 589 aa, Homo sapiens
MHFENISSPESSPEIKRRTYSQEGYDRSSTMLTLGPFRNSNLTELGLQEIKTIGYTSPRSRTEVNRQCPGEKEPVSDLQLGLDAVEPTALHKTLETPAHDRAEPNSQLDSTHSGRGTMYSSWVKSPDRTGVNFSVNSNLRDLTPSHQLEVGGGFRISESKCLMQDDTRGMFMETTVFCTSEDGLVSGFGRTVNDNLIDGNCTPQNPPQKKKVSLLEYRKRQREARKSGSKTENFPLISVSPHASGSLSNNGDGCASSNDNGEQVDHTASLPLPTPATVYNATSEETSNNCPVKDATASEKNEPEVQWTASTSVEQVRERSYQRALLLSDHRKDKDSGGESPCVSCSPSHVQSSPSSHSNHIPQLQAKGPVPSFSELMEDPDPENPEPTTTNECPSPDTSQNTCKSPPKMSKPGSPGSVIPAQAHGKIFTKPDPQWDSTVSASEAENGVHLKTELQQKQLSNNNQALSKNHPPQTHVRNSSEQLSQKLPSVPTKLHCPPSPHLENPPKSSTPHTPVQHGYLSPKPPSQQLGSPYRPHHSQSPQVGTPQREPQRNFYPAAQNLPANTQQATSGTLFTQTPSGQSSATYKMK

SEQ ID NO: 18392 - DNA, 2342 bp, Homo sapiens
  CDS (89)..(1867)
ccagccggcgcttgcgcggtggcacgggcgagtgggggggcgaggaggtggaggaggaggaggaggaggaggaggtggcggcgagaagatggcgacttcgaacaatccgcggaaattcagcgagaagatcgcgctgcacaatcagaagcaggcggaggagacggcggccttcgaggaggtcatgaaggacctgagcctgacgcgggccgcgcggctccagctccagaaatcccagtacctgcaactgggccccagccgaggccagtactatggcgggtccctgcccaacgtgaaccagatcgggagtggcaccatggacctgcccttccagaccccctcccaatcctcgggcctggacaccagccggaccacccggcaccatgggctggtggacagggtgtaccgggagcgtggccggctcggctccccacaccgccggcccctgtcagtggacaaacacggacggcaggccgacagctgcccctatggcaccatgtacctctcaccacccgcggacaccagctggagaaggaccaattctgactccgccctgcaccagagcacaatgacgcccacgcagccagaatcctttagcagtgggtcccaggacgtgcaccagaaaagagtcttactgttaacagtcccaggaatggaagagaccacatcagaggcagacaaaaacctttccaagcaagcatgggacaccaagaagacggggtccaggcccaagtcctgtgaggtccccggaatcaacatcttcccgtctgccgaccaggaaaacactacagccctgatccccgccacccacaacacaggggggtccctgcccgacctgaccaacatccacttcccctccccgctcccgaccccgctggaccccgaggagcccaccttccctgcactgagcagctccagcagcaccggcaacctcgcggccaacctgacgcacctgggcatcggtggcgccggccagggaatgagcacacctggctcctctccacagcaccgcccagctggcgtcagccccctgtccctgagcacagaggcaaggcgtcagcaggcatcgcccaccctgtccccgctgtcacccatcactcaggctgtagccatggacgccctgtctctggagcagcagctgccctacgccttcttcacccaggcgggctcccagcagccaccgccgcagccccagcccccgccgcctcctccacccgcgtcccagcagccaccacccccgtcacccccacaggcgcccgtccgcctgccccctggtggccccctgttgcccagcgccagcctgactcgtgggccacagccgcccccgcttgcagtcacggtaccgtcctctctcccccagtcccccccagagaaccctggccagccatcgatggggatcgacatcgcctcggcgccggctctgcagcagtaccgcactagcgccggctccccggccaaccagtctcccacctcgccagtctccaatcaaggcttctccccagggagctccccgcaactggagcagttcaacatgatggagaacgccatcagctccagcagcctgtacagcccgggctccacactcaactactcgcaggcggccatgatgggcctcacgggcagccacgggagcctgccggactcgcagcaactgggatacgccagccacggtggcatccccaacatcatcctcacagtgacaggagagtccccccccagcctctctaaagaactgaccagccaccgaggacaccttccggatggaccgcctgtgagcgggcacgccggcaccctgccgctcagccgtcccgacggcgcctccccagcccggggacggccgtgctccgtccctcgccaacggccgagcttgtgattctgagcttgcaatgccgccaagcgccccccgccagcccgcccccggttgtccacctcccgcgaagcccaatcgcgaggccgcgagccgggccgtccacccacccgcccgcccagggctgggctgggatcggaggccgtgagcctcccgcccctgcagaccctccctgcactggctccctcgcccccagccccggggcctgagccgtcccctgtaagatgcgggaagtgtcagctcccggcgtggcgggcaggctcaggggaggggcgcgcatggtccgccagggctgtgggccgtggcgcattttccgactgtttgtccagctctcactgccttccttggttcccggtcccccagcccatccgccatccccagcccgtggtcaggtagagagtgagccccacgccgccccagggaggaggcgccagagcgcggggcagacgcaaagtgaaataaacactattttgacggc

SEQ ID NO: 18393 - protein, 593 aa, Homo sapiens
MATSNNPRKFSEKIALHNQKQAEETAAFEEVMKDLSLTRAARLQLQKSQYLQLGPSRGQYYGGSLPNVNQIGSGTMDLPFQTPSQSSGLDTSRTTRHHGLVDRVYRERGRLGSPHRRPLSVDKHGRQADSCPYGTMYLSPPADTSWRRTNSDSALHQSTMTPTQPESFSSGSQDVHQKRVLLLTVPGMEETTSEADKNLSKQAWDTKKTGSRPKSCEVPGINIFPSADQENTTALIPATHNTGGSLPDLTNIHFPSPLPTPLDPEEPTFPALSSSSSTGNLAANLTHLGIGGAGQGMSTPGSSPQHRPAGVSPLSLSTEARRQQASPTLSPLSPITQAVAMDALSLEQQLPYAFFTQAGSQQPPPQPQPPPPPPPASQQPPPPSPPQAPVRLPPGGPLLPSASLTRGPQPPPLAVTVPSSLPQSPPENPGQPSMGIDIASAPALQQYRTSAGSPANQSPTSPVSNQGFSPGSSPQLEQFNMMENAISSSSLYSPGSTLNYSQAAMMGLTGSHGSLPDSQQLGYASHGGIPNIILTVTGESPPSLSKELTSHRGHLPDGPPVSGHAGTLPLSRPDGASPARGRPCSVPRQRPSL

SEQ ID NO: 18394 - DNA, 1882 bp, Homo sapiens
agttacacaggatgccgtcttgtgtttcctcttgtttagttacccactacagtgattttgtgatctgctaatgggttgccacccacaaccattgctttagcacttttacttcaaatcaatgaaggattgataaaagttctcctggtgtctccgcagagtgccttccaggaacagatctttgcatagaatatcagtggtttccttttttgtttcaaatagtggtcagaaaatacccagtgttgactcaccaaggcaatcagcttcctttttccctttttttgtttttttttaacattttatatttttgctttattttattttattttattttttgagacggagttccactctgtcgccaggctggagtgaagtggtacaatcttggctcactgcaacctccacctcccgggttcaagcaattctcctggctcagcctcctgagtgctgggactacaggcgcgtaccttctttagtagagactgggtttcaccatgttggccaggatggtctctatctcctgaccttgtgatctgcctgcctcagcttcccaaagtgctgagatgacaggtgtgagccatcagacccagcatttttttttttaatttaaatttaaatttttttcatttttttgagaggttttttttgttttgttttgttgttgttgttgttgttgttgttgttgtttttgagacagtcttggctctgtcacccaggctgggagtgcagtggcatgatctctgcaacctctacctcccaggttcaagcaattcttgtgcctcagcctcccaagtaactgggactacaggtgcacgctaccacacctggctgattttttttatgttttagtagagacagggtttcaaccatgttgcccaggttggtctcaaactcctgagctcaggcaatccacccgccttggcctcccaaagtgctaggattacaggtatgagccaccacacccagctattttttctttcgttttttaattttaaagttggggggggtctcaatttgttatcctggctgatctcgaactcccggacttaagcgatcctctggctccaagcccactaccagtctcaggtttctttactaaaagatcactacctttttttctcttatctgctgccatgtgagatgtggctttcaccttccgccatgattgtgaggccttcccagccacgtggaactgtaagtccaataaacctcttttgtaaattaaaaaaaaatcactatttaagatactaggatggattgtgactgttgaggagtacttacatatcctacatttgactacattatttccaaaccaagtattccatccaaaggaacatactgctataatagagaccaaggagggactgtttaaggttgccaaggtgaagcgagctgagaggctttgtcctcatgccagtaactctgaaatctctcttaattcctgctgtccaggcagcagaatgccatggtttccccaagtaggtagctgctttagcagttaaagcccaaatgtctgttctgttgatcagaggtctctgaatttctgaagtggtgtttcgtttctggtgactgagttaatcctttacaatccctcttgtaaagtgtgctaatagaaagaatccacctttcaaagctgcagaaccagaccgtgccctaaattgaccaacgtagctgatgtgcctcaggaagtctcttgccagctgtccctgtgaagacccccctcctcccccccagctgctgccttgcacactgaagcatctcagactgtgcaaagccgtgtagtcatcaagacagtaaatcccagggcttggttaagtgctgtgtgataacttgtttggatgagacttaacttaaaaccacttacaataaacttgggaaactaccg

SEQ ID NO: 18395 - DNA, 1570 bp, Homo sapiens
  CDS (101)..(1147)
acgatttgaacgctctgccttgcagctcttctggaccgaggagcccaaagccctaccctcaccattcaccaggttacagttcttatccacgtgaatacacatggctctgttacgaaaaattaatcaggtgctgctgttccttctgatcgtgaccctctgtgtgattctgtataagaaagttcataaggggactgtgcccaagaatgacacagatgatgaatccgagactcctgaagaactggaagaagagattcctgtggtgatttgtgctgcagcagggaggatgggtgccactatggctgccatcaatagcttctacagcaacactgacgccaacatcttgttctatgtagtgggactccggaatactctgactcgaatacgaaaatggattgaacattccaaactgagagaaataaactttaaaatcgtggaattcaacccgatggtcctcaaagggaagatcagaccagactcatcgaggcctgaattgctccagcctctgaactttgttcgattttatctccctctacttatccaccaacacgagaaagtcatctatttggacgatgatgtaattgtacaaggtgatatccaagaactgtatgacaccaccttggccctgggccacgcggcggctttctcagatgactgcgatttgccctctgctcaggacataaacagactcgtgggacttcagaacacatatatgggctatctggactaccggaagaaggccatcaaggaccttggcatcagccccagcacctgctctttcgatcctggtgtgattgttgccaacatgacagaatggaagcaccagcgcatcaccaagcaattggagaaatggatgcaaaagaatgtggaggaaaacctctatagcagctccctgggaggaggggtggccacctccccaatgctgattgtgtttcatgggaaatattccacaattaaccccctgtggcacataaggcacctgggctggaatccagatgccagatattcggagcattttctgcaggaagctaaattactccactggaatggaagacataaaccttgggacttccctagtgttcacaacgacttatgggaaagctggtttgttcctgaccctgcagggatatttaaactcaatcaccatagctgatataactctacccttaaaatattccctgtatagaaatgtggaattgtccctttgtagccaactataacattgttctttatgaatattacctttgatacatatgatccacaatataaaaaccaaaaactactgtgtgcaaattataccttggaccatataggcattgattaacttctttaagtacatgtgataactatggaaatcaagattatgtgactgaaaaacataaaggaagagacccatctagataacagcaatcaacctgcttaattctgaatgacaattatatccacaaatttttaaaacttctacatgtatttttcacatgaagatctccttaacaggttgccaaccttttcttttataaaactattacatttaaaatatggacgtctgaaaaataaaatattcatcattttt

SEQ ID NO: 18396 - protein, 349 aa, Homo sapiens [sequence omitted]

SEQ ID NO: 18397 - DNA, 949 bp, Homo sapiens
gaaaaagaatggaaaatcttgaagccttagaattaggtaattgtggccgggcatagtggctcacccttgtaatcccagcactttgggaggacaaggtgggtggatcacttgaggccaggagtttgagaccaacctggccaacacagtgaaactccatctctactaaaaatacaaaaaattagcccggcgtggtggtgcgcgcctgtagtcccagctactcaggaggctgaggcaggagaatctcttgaacccgggagacagaggttgcagtgagccgagatcgcgtcactgcactccagcctggcgacacagcgagactccgtctcaaaaacaaaacaaaacaaaaaaacacatgccgggctcggtggctcatgcctgtaatcccagcactttgggaggctaaggcaggtggatcacctgaggtcgggagttcgagaccagcctgaccaacatggagaaaccccgtctctactaaaaatacaaaattagctgggcgtggtggcgcatgcctgtaatcccagctacttgggaggctgaggcaggagaatcgcttgaacctgggaggcagaggttatggtgagctgagatggcaccattgcactctagcctgggcaacaagagcaaaactgcgtctcaaaaaaagagaagaaagaaaaagaaaatgggggccggacgcggtggctcacgcctgtaatcccagcaccttgggaggccgaggtgggcagatcacctgaggtcgggagttcgagaccagtctgaccaatatggagaaaccccatctctactaaaaatataaaattagccgggcgtggtggcacatgcctgtaatcccagctactcaggaggctgaggcagaagaatcgcttaaacctgggaggtggaggttgcagtgagccaagatcgtgccattgcactccaggctgggcaacaagagcgaaactcatctcat

SEQ ID NO: 18398 - DNA, 1979 bp, Homo sapiens
attttgcaatgatattaataatgtcattagattttctttggattttttgaaaaaaataatggttttagaaggaaatctggataaattttatctctgtcctgtgtcagaaaaatataaaacttgagttttttaaattaaggtactaagatgaataaattgcatctatagatattgaaatatgactgtaatttgataatgcattttcattctcagtgtcattgttcatcataatagtatctacatcaccaacttcatttagagcttgaatcttgtaacaatagagattgaaaataaattggtttataattaactctgacagagaatgatgtttttacttttatacttctctatagaagtacatgtcccttaattttaaggaatgaacaagtcagatggaagatttttactgagatcaggaatgaattgagtaatttagttttctttttaaagctggggagaaatgagcaaaatcaaggagaaatatcttgcttttgatatttattactgatgctgtgacactccctttaatcaatgttttttaatatgggtggcagtatctcagttaaccaaatagttaagtaagtagatttttgtattgtatatagtaaacagtatcctaattgttgccaaggagacaaggaattacctaatgggcaaaaatgcccttatatttatttacctcaaattcagtcacacttgactgtatctccacaaattcagatggagagctggaaaatttatagagaagaccagggtttaaatcttgttttttcaaattatgtttggtcatgatgaatctgaatcatttatttaatgataaaatcatctgacttctcacttctcacttctcccttcagttaaaattatttaagtaatggatttgtttttctatgagagacatttggtattttggtaatgaaagtgtattattttagttgcatataatttgaaaacagcattttatggcaaatctatcaagccaggcagatactttgcatttttgatctttttttttttttttttttttggtggctacatcttttctgtattctcagatatgtcgttaaagatggtgccacctatagtggccattttcgttatctaaacaaaaccaacatctgttggattgaaaaactatgctatgatcgactgctttatgtgtgtatgtttttttttttttttcaaatcccttaagattcttttctataattagttttctttgaagaagcttggaaagttttctgcattgagatttagaatccacagtgtttctgtaatttagctttccaggaattttgaattttaatttttgtttttactttttatgtacacagtataatgatgttagtgttaaatattaaaaatctgactcttcactgggacttttttatagatacaaatgtatctgtggtagtacaaggactttgttactttggcgtgcagtcttatcaaggagttgtgtgtgtgttttgcatacaactttacaatttcatagttgaaagctgttacaaaatgaaagttttgtgtatggtaggatatcttcaaggtgggtggatgttttctgtttaaaagattaagatgccaacagcgtttttttcttttaattttttcatcaagcacccagtcagcttgaagagtttcaaatggaccctaccactgagaaatcaagatggcagtctactatggggaattgaggaaaaatggattaatacaagagtcctgtgataatatacaaccaagacagggttcttttaacatggattccatgcagtgaatgaagacataggtttcttacccaacacaaatggacagtggatttgactttctaaagactttttttgtggacattttgacatttggagaagaaagatggcacactaacccagataatagtttttatgcctggaatttttttgcagtttgatttgtatacgtatgacctcttgaaatgttaatttttaataaaatttgtaacactt

SEQ ID NO: 18399 - DNA, 1947 bp, Homo sapiens
  CDS (312)..(776)
tcaaacatgtgacaacattaagcaccctggtagaggcaagatttgccaggcggctctcacatacccctgcctcccacaatactacccccgcctcccatgatatgatgagatgacaaggcactttacctctgcattatactccacaaaacccgtaatcccagacaatcatgagaaaacatcagacaaacccagatcagcagacattctacaaaacaccgagtccttcccaacactgtccacggaatgaaaaacaaggaaaatctaagaaatggtcacagacgagagaagactacaagaggcatgatgactgaatgcaagggtctcactctgctgtccaagctggagtgtggtggtgccatcatgactcactgcagccttggcctcccgggctcaggcgatcctcctgcctcagcctccagagtctctgggactacaggagtctcgctctttcgctgaggctggcttgcaatggcacgacctcggctcactgcgacctctgccttctgagttcaagcgattctcctgcctcagcctcccaagtagctgggattacaggagaaaagactgcagaaccacacaaggctcacgctgcccagggagaacgtcatctcagttcccatatgagtcccgatgaaaatatgacagagaaattctgtcctggaccacgagcatcttttcatcttcgtatcctagcagccagcaggcacttggtgaagaggctgctcaacgaatatacagtgacggttttacgggacaagagttacctgaggaacaactaaatctgccccatcaagcaattcttgacagagtgttgtcaccacacagaatcctcagtttgaaactaacacaaactgaaatgtgcaaaactgaatctgtttctttggggagcacaaaccagtagagcttctatgtgataagggaagatgctgcagtttgaccgagtttgccaaggagaagatgtccctgggacactgagctacttttttacacatacaggtcaagggtccacgtgtggtccttactgggcgccccctattctgccccgtgtgggaagcatgtgacttgatgctgtacatgtaaaacatggtttctgctcttaagaagtttacaggccagcagggaatggtaaaatgcgtgaggaagaacccctaggctgggcgcggtggctcacacctgtaatcccagtactttgggaggccgaggccagtgcatcacctgaggtcaggagttcaagaccagcctggccaacatgctgaaaccctgtctctactaaaaatacaagaattagccgggcgtggtggcacgtgcctattaccccagctactcaggaggctgaggctggagaattgcttgaacccaggagaaggaggtttcagtgagccgagatcgtgccactgcactcaggctgggcaacaagagcaaaactccgtctcaaaaaaaaaaaaagaaagaaagaaagaaaaaaaaaacccccgcaactccaggtggattggcactgactactgagcacaccatacatgtgcaaaggaagaaaaagggctgtgatgaagtgaggcaagctggggcctcaactggctgcatctggaatttcaacagcaagacaagaatggactagacagaccagtgttctcacccactgtttccatgatcactctcacaacagaaaaataaaattgacaagaaaaattactcaagaataaggctgggtatggtggctcgcgcctgtaatgctggcattctgggaggccgaggcaggaggatcacttgaggccaggggtttcagaccagcccgggcaacaaagcaaatccctgtctctacaaaaaaataaatttaagttagccaagcgtggtggagtgcatctgtagtctaagatacttgggaggtcaacgcaggaggatcacctcaggccaggagttcaagaccagcctgggcaactccatctctac

SEQ ID NO: 18400 - protein, 155 aa, Homo sapiens
MQGSHSAVQAGVWWCHHDSLQPWPPGLRRSSCLSLQSLWDYRSLALSLRLACNGTTSAHCDLCLLSSSDSPASASQVAGITGEKTAEPHKAHAAQGERHLSSHMSPDENMTEKFCPGPRASFHLRILAASRHLVKRLLNEYTVTVLRDKSYLRNN

SEQ ID NO: 18401 - DNA, 1983 bp, Homo sapiens
ctcttcgttaagtcggccttcccaacatggcgcagtctattaacatcacggagctgaatctgccgcagctagaaatgctcaagaaccagctggaccaggaagtggagttcttgtccacgtccattgctcagctcaaagtggtacagaccaagtatgtggaagccaaggactgtctgaacgtgctgaacaagagcaacgaggacggaatttcgctctgtcgcccaggctggagcgcaatggtgagatcttggcttactgcaacctccgcctcccgagttcaagagattcttctgcctcagtctcccgagtagctgggactttaggtacgcgccaccacgaccggctaatttttgtattaatagtggagttgggggtttcaccatgttggccaggctagtctcgaactcctgacctcgtgatccgcctgcctcggcctcccaaagtgctaggattacattacaggcgtgagccactgcccccggccaagaatactcttattacacactttgtagctcttttatctgacttcacaccaacatccagctaatgtcttgtgaacaccaaggagtatgtatagttgagatgtaatatttccctttgctgtttgagaacattaatatggagataaagctggtggtttacactttgctaatatcttagaagatacaggcaatagacaaaaataggaggatatagaaacagggagcttggctctgttaatcttcaacttcagcttaattgtggctcatttctaaactgtcactaagaaacctggattgtgttcacttgttcagtgttttatttgaatgagcaagttatggcagtagggcatctttaatctgtagtctcagaactgacaggctaaaaggaacacaggaatagtagtgtgtagtagggaatggtttaaaaaaaaaaattagccaggcacagtggttcacgcctgtaatcccagcactttgggaggccaaggctggcagatcacctgaggtcaggagttagagatcggtctggccaacatggtgaaaccccgtctttactaaatatacaaaaattagccaggcgtggtggcacatgcttgtaatcccagctactccggcgactgagacaggagaattgctttaacccgagaggcagaggttgcagtgagccgatagcgggcaattgcactccaacctgggcgatagagcgagactctgtctcagaaagcaaaaaacaaacaaaacattgactttgtcaggaattagctacttcatgattgagggcattaagggaaatgaggctggctttttacttgtagtactctacaacagtaggaaaacattatgtctagtctttctggaggggctaatgggaagaattgcaagaactgcttagagagtgagagatgggatgaggcaggacaagagggtgttccagcatacatcattttctccttaaagaaccaacttctctgtcttctttccatttggagttataggtattgttctaaggcctccagattattcagtccttatgccttgtagctttttggaaaaagagggtctttggaggccaagcaggctggctggcggaatcatggctcatgctgggctggctagtttttcccttaattcttgcttctcagatgtatgcccctgggaagctgcatgatgtggaacacgtgctcatcgatgtgggaactgggtactatgtagagaagacagctgaggatgccaaggacttcttcaagaggaagatagattttctaaccaagcagatggagaaaatccaaccagctcttcaggagaagcacgccatgaaacaggccgtcatggaaatgatgagtcagaagattcagcagctcacagccctgggggcagctcaggctactgctaaggcctgagagtttttgcagaaatggggcagagggacaccctttgggcgtggcttcctggtgatgggaagggtcttgtgttttaatgccaataaatgtgccagctgggc

SEQ ID NO: 18402 - DNA, 1841 bp, Homo sapiens
  CDS (119)..(829)
aactcgcacccgggtcctggctgcaccgcatcccctcctgcaccccctggatggcccttcagccaacgggggcctgggcgatggtcgaccacggagctgcgcaaggaaaagtcccgggatgcggcccgcagccggcgcagccaggagaccgaggtgctgtaccagctggctcacacgctgcccttcgcccgcggcgtcagcgcccacctggacaaggcctctatcatgcgcctcaccatcagctacctgcgcatgcaccgcctctgcgccgcaagaggagcttcaggacgccctgaccccccagcagaccctgtccaggaggaaggtggaggcccccacggagcggtgcttctccttgcgcatgaagagtacgctcaccagccgcgggcgcaccctcaacctcaaggcggccacctggaaggtgctgaactgctctggacatatgagggcctacaagccacctgcgcagacttctccagctgggagccctgactcagagcccccgctgcagtgcctggtgctcatctgcgaagccatcccccacccaggcagcctggagggcttcgtcatggtgctcaccgccgagggagacatggcttacctgtcggagaatgtcagcaatcacctgggcctcagtcagctggagctcattggacacagcatctttgatttcatccacccctgtgaccaagaggagcttcaggacgccctgaccccccacctcaacaccagctccctgctccccaagccccaaggaactgtctccttccttgccccctcatacccagtccccagatctttctctccccatttgcccccttggtggccctgatccctcccgatccccctcctcagtgctgagcaagggccaggcagtaacagggcagtatcgcttcctggcccggagtggtggctacctgtggacccagacccaggccacagtggtgtcagggggacggggcccccagtcggagagtatcgtctgtgtccattttttaatcaggtaagcaggaggaggggctggggtggctgtgtgtgggcctgatctgcatgtgtggacaggtgtgtgtgtgtgtgtgtgtgtgtgtgtgtgtgcgtatgagcatgcatgtgtatcatgcataagtgtatgtgagggagtgtgcacgtgtacacatatgaggaatgtgtgtcaccatgtaaatgccggtgtgtgtgtctgcatggacacaggtatgtgtatgggtgtgtagactgttaattttttttttttttttttttttgcgtgaacctctgcttaagtggattgttaattcaaattagaaaggggtctttatttggcctggcatggtggctcatgcctgtaatcctagcactttgggaggctgaggtgggcggattgcctgagctcaggagttcgaaaccagcctgggcaacatgacgaaatgctgtttctactaataataccaaaaattagccgggtgtggtgacacatgcctgtaatcccagctactcgggaggctgaggcacgagaatcattagaacccaggtggtggaggctgcagtgagccgagattgcgtcagtgcactctggcctcggcaacagagcgagactctgtctcaaacaaacaaacaaacaaacaaaaggactctatattcaagttaaaataagaagtgtaacagaatcatggggtcttttttgctttttaaattttgatgtggctcacacctgtaaatcccagaactttgggaggccaggggaggaggattgctagagcctgggggttcaagaccagcctgggcaaagtggttaggacccattctcaaaaaaaaaaaaaaaaaaaaaaacctgaaaacagacc

SEQ ID NO: 18403 - protein, 237 aa, Homo sapiens [sequence omitted]

SEQ ID NO: 18404 - DNA, 1492 bp, Homo sapiens
  CDS (61)..(657)
agcgctggtcggcgtctggcggttgtttttagaggtaatacacctagtttgtggctcagcatgtcaattgtaacagtgcaacttggtcagtgtggcaatcagattggttttgaagtttttgatgctttgcttagtgactcacacagttcccagggactctgctctatgagagagaatgaggcatatcaagcatcttgcaaagaaagattcttcagtgaggaggagaatggaggtattgataggcatgtatggcctcctttatcaggacttcctcctcttagtaaaatgtctctcaacaaggacctgcattttaacacttccattgctaacttggtcattcttcgtgggaaagatgtgcaaagtgcagatgtggagggatttaaagatccagctctgtatacttcctggttgaagcctgttaatgctttcaacgtgtggaaaacccagcgggcctttagcaaatatgagaagtctgcagtgttggtcagcgacagccagttcttagtaaaaccacttgatatgattgttgggaaggcatggaatatgtttgcttcaaaagcctacattcatcagtacacaaaatttggaatcgaagaagaggactttttagacagtttcacgtcattagagcaggttgttgccagttactgtaatctctgatcttgaacaatgggaaaagtataccttaaggcatttctggactaaaatattttcaatactattttctctgtaaagttttcaaagttctccatcctggctaacacggtgaaacaccgtctctaccagaaaatacaaaaaaattagccaggcgcggtggcgggtgcctgtagtcccagctactcgggaggctgaggcaggagaatgacgtgaacccaggaggcggagcttgcagtgagccgagatcgcgccactgcactccagcctgggcgacagagcgagactccgtctcaaaaaaaaaaaaaaaaaaaaatgttttcaaagttccattctgttaaagtaaccacgtagaatgctgagtctattctgcatactatgcccacagaaaaggaagaaaactttttaaaatggagaatcgcatgttttcaatgaaaacattcacttggtatttcatttgtaagaaaaaaaatggtgcttttataaagaactttggggaaacactttgctgaaatgttgggactctggaactagccaagaaaagagaatattctctttgtctacatgttcctaaatctttactccaaaacaactccaaaaacaactcacaaagcatgaaccaaactttcacagcataatttcaagctaaggaattgtaattctgtacttaatatattcatgtttgaaatgaatgctttgaaccacaggagggagatgttgtcaaatgctacagtgtgaacatgtattttgaatattctgtaacagggcaagtttccactctaagcagctatttaaaaataaatatgaggattttggtaataaatgcttatgcttaagt

SEQ ID NO: 18405 - protein, 199 aa, Homo sapiens [sequence omitted]

SEQ ID NO: 18406 - DNA, 1659 bp, Homo sapiens
  CDS (120)..(704)
tctcgagagccggcatctcctaggagctagtcctggtcctcggctaggcggcttggggtcgcggcgtaactggggagccagcctgacgccggcggaccccgcctgtgatcctggcaacgatggatgatgacttgatgttggcactgcggcttcaggaggagtggaacttgcaggaggcggagcgcgatcatgcccaggagtccctgtcgctagtggacgcgtcgtgggagttggtggaccccacaccggacttgcaggcactgtttgttcagtttaacgaccaattcttctggggccagctggaggccgtcgaggtgaagtggagcgtgcgaatgaccctgtgtgctgggatatgcagctatgaagggaagggtggaatgtgttccatccgtctcagcgaaccccttttgaagttgaggccaagaaaggatcttgtagaggtataccatacttttcacgatgaggtggatgagtatcggcgacactggtggcgctgcaatgggccgtgccagcacaggccaccgtattacggctatgtcaaacgagctactaacagggaaccctctgctcatgactattggtgggctgagcaccagaaaacctgtggaggcacttacataaaaatcaaggaaccagagaattactcaaaaaaaaggcaaaggaaaggcaaaactaggaaaggaaccagtattggccgcagagaataaaggtaccttcgtgtatattcttctgatttttatgtgaccatagctatgatgtaaagacaatactgtccttcagagaactggtattaagataaacttaaggatcgtttctggtgtagaagtcttcaagtgtagacttaaggaaaaaatcccactgtccatgaaatgatggtaggaaaacagactttgctctgtacagaagtaagtaaaagtaggaatagtttccatggatatttttatttttattaacttttttcagtttctttttattcaaagaaacaaaattcaatctctgataatatttgaggtaaagttccttcccctatcttgactcactgagttattaggaaacagaaggcaaaaagattgtcaaaataaaaacaataattcaagtaacaatgcccggaatatacgtcctaactacaccccttcctatcagctggattctatccaagtgactctattgatgtatgtatgttcattcaaagaatgggaaaaggatatgacatatatttgccagtacttcatcttcaagatttacccttttcctgtgaagttcagagttactgaagatgcttcttcccttgggaagttgttgacccaagaacataggttatatttcccaaatctttaattattgagtgaaagagctatagatgaattgatatggaaagaccgtatcttcattttcgtgagtagaaggaaagataagaatgaggcagcagattttccctcctggaattacacataaaggacactaagcaattttcaaggtaaatgttgccttgttgttggtctttggcatgataagattctttatttaaatatgagagaatttttttttatcctttatattctctcaatatcagaactcctgaattctgaagattgccctcctcccattaataggattgtatggatgtaagatggaataaaatactagttcttcattttg

SEQ ID NO: 18407 - protein, 195 aa, Homo sapiens
MDDDLMLALRLQEEWNLQEAERDHAQESLSLVDASWELVDPTPDLQALFVQFNDQFFWGQLEAVEVKWSVRMTLCAGICSYEGKGGMCSIRLSEPLLKLRPRKDLVEVYHTFHDEVDEYRRHWWRCNGPCQHRPPYYGYVKRATNREPSAHDYWWAEHQKTCGGTYIKIKEPENYSKKRQRKGKTRKGTSIGRRE

SEQ ID NO: 18408 - DNA, 2323 bp, Homo sapiens
  CDS (78)..(389)
ggactctggctttgaggccccacgcctgggtgagcagggcggggactttggctacggcgggtacctctttccgggctatggcgtgggcaagcaggatgtgtactacggcgtggccgagactagccccccgctgtgggcgggccaggagaacgccacgcccacctccgtgctcttctcctcctcctcctcctcctcctcttccgccaaggcccgcgctgggcccccgggcgcacaccgctcccctgccacttccgcgggacccgagctggccggactcccgaggcgccccccgggagagccgctccggggcttctctaaacttggtgggggcggcctgcggagccccgcagccggcgggcgggattgcatggtctgctttgagagcgaagtgactgccgcccttgtgccctgcggacacaacctgttctgcatggagtgtgcagtacgcatctgcgagaggacggacccagagtgtcccgtctgccacatcacagccacgcaagccatccgaatattctcctaagccccgtgccccatgcctccggggcccactccactgggcccaccctggacctgttttccactaaagccttttggaaagcggtgatttgaggggcaaggtgcttagagatactcgctcgctggggaaggggggagggaggcagtggtggctggagggtgcgccactttcagagcctctggtcaccctgtcctggaaagattgggagggggccagactgaaaattttactagagttacaactctgatacctcaacacacccttaaatctggaagcagctaagagaaacttttgttttgccagaggtggccactaaggcattctgacgccctctgcccacctcccccgctgtgtgtcactccaccccttcttccgaggagggggtgggtaaaagggagagggagaattaccacctgtatctagaggtgctctttgcaatccctaagccctctggtcctgacctccgacctcccagctctgtcttgttccttgtctttgtctttcttcccttccccctgcccctgcccctaccagcccagctttggggacaccatccttctggggagaagtagggggaggaatatttggatggtccctccattcctcttcaggcatctggaggccctctcccccactcctccaaagaaacatctcaaattattgatggaatgtatccccattctcagtgaaaatgtgaggaggggactaatactggggtaaagggtcaaacccccaccttcatcactatgggcattatatttagggagtagttcttgggctggattttctggttgtggaagtgggggcgccagagtagtgtgtctgctatttaaaggagcaggaaagggcgtgaggcaggaggagagactggtggagggaagagctgctcctcccatgcagtgcccgactccctgcacccctctcaacctgacctgaacctttattgaatccttattagcttgaatccttattagcttgaatcctccatgcaaatcatggagtctgtgtcccacctgatgtggttgaggagaagccaggtcttcaaagaggggtcagcctggggcaaagcaggactggggggaggtgggcagcagggcctattctgagaatcacatattgttacaggccttgcaccccctttgctgcttccctcctgctcatttggggctgccaccagctctccaccctcctggttccgctggccgggccaagagaggatggagggatgggagtcccaggagatccttgtaaatagtggggtgggactgttctgagtgatcacccgagcacttaaagctccagagtcccattcttcctggatggagcaggtggaggtgcagaggggatttcctcctctccttcctcctgtcgagaattaacacctctccacagccttcccctccagaacaccagccagggaggggtggggaaggaggtcacagccaagaaaactgccctgtgacgacttccctccttcccgcctatgtgagccatcctgagatgtctgtacaatagaaaccaaaccaaatgggcaccctcggttgccggggggcaggtggggaggggggtgggaagaagggatgtctgtctgtcgtccccctccccctctccactctttacccacaaaggcagaagactgttacactagggggctcagcaaattcaatcccacccttaccaattgagccaaacctagaaacaaacacaaaacacgaatagtgagagacaaaatagaggagagaaagagagcatgagagggagcgagacaggcgaccaacacagaggagagaaaacaaaaatagc

SEQ ID NO: 18409 - protein, 104 aa, Homo sapiens [sequence omitted]

SEQ ID NO: 18410 - DNA, 1962 bp, Homo sapiens
  CDS (213)..(938)
agtgcgcatccggacgtaggaggtggaggttgtggaattcgccgttcgaaagcagggactaaaagccccacttcgtcttacgttccgaaaggaaggcgtctgttgagcctttctctcagtcgtgagggaggcgtcgacggcgtgcggaagtcctgagttgaggcttgcgggatcctttccggagaaagcgcaggctaaagccgcaggtgaagatgtccaactacgtgaacgacatgtggccgggctcgccgcaggagaaggattcgccctcgacctcgcggtcgggcgggtccagccggctgtcgtcgcggtctaggagccgctctttttccagaagctctcggtcccattcccgcgtctcgagccggttttcgtccaggagtcggaggagcaagtccaggtcccgttcccgaaggcgccaccagcggaagtacaggcgctactcgcggtcatactcgcggagccggtcgcgatcccgcagccgccgttaccgagagaggcgctacgggttcaccaggagatactaccggtctccttcgcggtaccggtcccggtcccgtagcaggtcgcgctctcggggaaggtcgtactgcggaagggcgtacgcgatcgcgcggggacagcgctactacggctttggtcgcacagtgtacccggaggagcacagcagatggagggacagatccaggacgaggtcgcggagcagaaccccctttcgcttaagtgaaaaagatcgaatggagctgttagaaatagcaaaaaccaatgcagcgaaagctctaggaacaaccaacattgacttgccagctagtctcagaactgttccttcagccaaagaaacaagccgtggaataggtgtatcaagtaatggtgcaaagcctgaagtaagtattctaggtttgtcggaacaaaactttcagaaagccaactgtcaaatctgattagccacttatatcttagactatactttttgggaagtctagagatgtatataatgtgctaaattcaaagtagcaaatctgaagataggcaatgtcaaacccatgaaaatgggagattaatgagctttatttggccgtgcatggtgcctcatgcctgtaatgaggcagatggcttgagtccaggagttcaagactagcctgggcaatgtggcaaaaccgcgtgtttacaaaaaatacaaaaattagccaggcatggtggtgcatgcctgtagtcccagctgtttgggaggctgaggcaggaggatctttgagcctaggatgctaaggttgcagtgagccaagatggcaccattgcactctagcctgggcagcagagcgagaccctgtctcaaaaaatacatttatttttttcattttcagttaacagtgtactcttataacaccgttattagctggtactttggtgatttctattactagtttttctaagctatttacagagtgtttgtagctttcatttgcagcattatgttcccacaaattctgtactcagcatatacagtatagtttatctgctctatttctgtcttatagaaatcatgaatgtggtctgcagacattgatgaagaaaatctgttggtaattgatacatgggctaaagcatcagaggtttaatttgaagtttatgttcacacactgaaaacttagtttttttgttggtagatccatgtgcatgctagaatttgggacaggcactatttgcataaagtattaaagtcaatttttaaactaagcaaaggtacacgttgtaacggtggggcatctgtgaaaaagatgtccctttcataatatatgcaatatattccagatgttttgagagattacagaagaggaggcctgcttcacttgcagataagtttattataattctccagaaatgtgcaggatgtgcattagcaaattgcactgtacttttcactccagcctgggtgacagagcaagactcccgtctcgggggctt

SEQ ID NO: 18411 - protein, 242 aa, Homo sapiens
MSNYVNDMWPGSPQEKDSPSTSRSGGSSRLSSRSRSRSFSRSSRSHSRVSSRFSSRSRRSKSRSRSRRRHQRKYRRYSRSYSRSRSRSRSRRYRERRYGFTRRYYRSPSRYRSRSRSRSRSRGRSYCGRAYAIARGQRYYGFGRTVYPEEHSRWRDRSRTRSRSRTPFRLSEKDRMELLEIAKTNAAKALGTTNIDLPASLRTVPSAKETSRGIGVSSNGAKPEVSILGLSEQNFQKANCQI

SEQ ID NO: 18412 - DNA, 2067 bp, Homo sapiens
agttgggcatggtggcgggtgcctgtagtcccagctgcttgggaggctgaggcaggagaatggcgggaacccgggaggcagagcttgcagtaagccgagatcacgccactgcactccagcctgggcgacagaccgagactccatctcaaaaaaaaaaaaaaaaaaaaaaaaaaaaaaaaaaaatatatatatatatatatatatatatatgtataggctgggtgcagtggctattcagaggctcactcattgtgcgcatggtgcttatggtgcctggaatagctggcactacaggcatgtgttctgtgccagctcaagtcttcaattttgcttcagatctttaactttttaattgtgaaatataactgtatgcagaaaactgcataaaacacaaaggtactgaataacaaataattataaagtgacatctgggtcaataactagaccacagtcagacccctgaagctccctctgtgtcttgtctagtcacatccccctccccttgctcaagaggttttcagtaatcacatcctttttttctctatggttttacctcctagttttggaatccataagcagtatatttcagctttgcatgtttttgaactcagttcaaatggaatttgtacaaaataatatgctgtgcatattatttcttgcttcttttactttatatcattatgtaagattcatccatgttattgcagcttatttcttttttgcttgtttatttgtttgtttttgtttttttgagacagtctcactctgtcacctaggctagagtgcagtggcgcgatctcggctcactacacctccacctcctgggttcaaacgattctcctgcctccgcctcccaggtagctgggaccataggtgcacgccaccaggcctggctaatttttgtattttttagtagagacagggttttgccatgttggtcaggctggcctcaaactcctgacttcaggtgagccacccgcctcatactgcagcttatttcttcattgctgaataatattccattatatgagtatacccccagttgtttacccattttattgtcatctcaagtttttgcccattgcaaataacattgctgtgagtagtcttttatgtatatcctagtacaactggcacaagttccttcaggtatatgctgaagaagtagaattgctagataataaggcacgcatactttaggcttttgccaaaccatttttcaaagtggttgtactaacttatactcccactagctagtagaaagtcaacactggttcacatgattcccaacatttggtattatcagccttttacatttttgccaatctagtggctatattgtggcatatatttgtggttttaatttgcacttccctgattactagtaaagttaaatgcctttttaaatgcttactggcctttagggtttctgcttttgggaagtgtctgttcaaatctttgacatatttttccataggggctatctgtcatttttgtaagatttgtaggagttctttatatatgctagatatgagtttataggattacaaaggaaatcaattatattgacataatagttatcaaatataaaaatgcaagtatgtgggcttatttatttatacaataaataagatctggtgcaggcgtaataacaactataatatcaaagtgattataagcattgacattatttcaagatatctgcaacaaaaatatctggtttccacttgtgacaacgccacaggtactattaacattatgtactgtgggccaggcgtggtggctcacacctgtaatcccagcactttgggaggtcaaggtgggcagatcacgaggtcaggaagtcgagaccatcctggctaacacggtgaaaccccatctctactaaaaatacaaaaaattagccgggcgcggtggtgggcgcctgtagtcccagctactcgggaggctgaggcaggagaatggtgtgaacccaggaggcggagcttgcagtgagccgagatcgtgccactgcactccagcctgggtgacagagtgagactccctctcaaaaaaaaaaaagaaaag

SEQ ID NO: 18413 - DNA, 1540 bp, Homo sapiens
ttctctcttcccaaaactcagacactgagagaggttctcgtcagagtccaaaatgcacattaagttgtggggatcttattaacaatgatgattctgatgctgtaggtttgaagacgactcaagattccctggagacatcaatgctgctggtccatgggccacggcttggatagaaagggtttagggagaggttgacaagtaataatgcagggtgggtgagtactgctctactggcattctaaaagcagagtgagacagagaggggtatggggagtggggaggaggcaggcaaagcctcctagaagtgagtgacttggaccctgaataggtgagtcaatttaccaagcagaaaagtaggaaaggcctttggtcagagggagcaccatggatgtggaccccggctggctcctgcatagagtgaagaatgcagaggaaggtgatgggacgatggccagagaggaggctggaaagctcaccagggtctggatggtgaagggtcagctctgtttgccatggtaagacctaagactccagtcagcagggagtcttgaggtttcacagaggtctggttatagtggacatgacaaactgctttgaaaatagccaatactacatcatgttagagaatttgcataacccagcagggcgcggtggctcacgcctgtaatcctagcactttgggaggccgaggcgggcggatcatgaggtcaggagatagagaccatcctggctaacacggtgaaaccgtctctactaaaaatacaaaaagaaattagccgggcgtgggggcgggcacctgtagttccagctacacgggaggctgaggtaggagaatggcgtgaacccgggaggcggggcttgcagtgagccgagatcgcgccactgcactccagcctgggcgacagagggagacgccgtctcaaaaaaagaaaaaaaaaaaaaaaaaaaagagaatttgcataacccaaaggagattgtgcttgaacactcccaggcagtgaataatctgcaaaggagtaagactgtagttgagaggcaggtttttagacttccacaggcttgggggacaaacagaacagaaattgatttctggttccctgctttctagctatataacctcaagaaaattaattaactttctgaatcttagttttctcacctgtagaaaggatgcaataaatcctgtctcatcaaagaattgtgaagaggaagtcattcatttaattaattgaagcactacattttggcaaagcatgcagtttgttgataacaggaggtatttgttaacttattattaatgttgatttggagctcccatgaatttttgcctaggaaatgacctggtagatcggatagttaccatgttgatagattgccaagtgccttttctcatgtgtggggttctgatgccatcatcagctggaagctcagttggtcttgtgggtggcatgctgcaccagttgtctgattcagcaatgctgtgagagaattgagagggcgttcattcagtaaagggtgggaaggattttcttaaatgttt

SEQ ID NO: 18414 - DNA, 1597 bp, Homo sapiens
  CDS (13)..(1143)
ggcggagcgaacatggacccggctgcgcgggtggtgcgggcgctgtggcctggtgggtgcgccttggcctggaggctgggaggccgcccccagccgctgctacccacgcagagccgggctggcttcgcgggggcggcgggcggcccgagccccgtggctgcagctcgtaaggggagcccgcggctgctgggagctgcggcgctggccctggggggagccctggggctgtaccacacggcgcggtggcacctgcgcgcccaggacctccacgcagagcgctcagccgcgcagctctccctgtccagccgcctgcagctgaccctgtaccagtacaagacgtgtcccttctgcagcaaggtccgagccttcctcgacttccatgccctgccctaccaggtggtggaggtgaaccctgtgcgcagggctgagatcaagttctcctcctacagaaaggtgcccatcctggtggcccaggaaggagaaagctcgcaacaactaaatgactcctctgtcatcatcagcgccctcaagacctacctggtgtcggggcagcccctggaagagatcatcacctactacccagccatgaaggctgtgaacgagcagggcaaggaggtgaccgagttcggcaataagtactggctcatgctcaacgagaaggaggcccagcaagtgtatggtgggaaggaggccaggacggaggagatgaagtggcggcagtgggcggacgactggctggtgcacctgatctcccccaatgtgtaccgcacgcccaccgaggctctggcgtcctttgactacattgtccgcgagggcaagttcggagccgtggagggtgccgtggccaagtacatgggtgcagcggccatgtacctcatcagcaagcgactcaagagcaggcaccgcctccaggacaacgtgcgcgaggacctctatgaggctgctgacaagtgggtggctgctgtgggcaaggaccggcccttcatggggggccagaagccgaatctcgctgatttggcggtgtatggcgtgctgcgtgtgatggaggggctggatgcattcgatgacctgatgcagcacacgcacatccagccctggtacctgcgggtggagagggccatcaccgaggcctccccagcgcactgaatgtccccgcgcagagcagagggaaggcagcggaagacgccagctgccagggcctggggccactgggccagcgcctggcgatactggttgggggcaggatcattctgccccttgtccacgcacccccaccagccctctcgcttctaacacagggcacctgctggggctcagggatgttagggacgagttccagccctgccactgccctggggcgacccctccctgtccctgcctccctgctctgccgcccctcttcctggaccctcagtggctgtcccatggctacatcctgtgggtgggggccctcgacaggacagcaggacggtttgttttcagtggaatcccatccctgggttcccctggttcccactcttcccaagcctcccgggactgggacatgtttgcaataaaggaaaggtttgtggcgcctgtcatggcaggcatctcatgg

SEQ ID NO: 18415 - protein, 377 aa, Homo sapiens
MDPAARVVRALWPGGCALAWRLGGRPQPLLPTQSRAGFAGAAGGPSPVAAARKGSPRLLGAAALALGGALGLYHTARWHLRAQDLHAERSAAQLSLSSRLQLTLYQYKTCPFCSKVRAFLDFHALPYQVVEVNPVRRAEIKFSSYRKVPILVAQEGESSQQLNDSSVIISALKTYLVSGQPLEEIITYYPAMKAVNEQGKEVTEFGNKYWLMLNEKEAQQVYGGKEARTEEMKWRQWADDWLVHLISPNVYRTPTEALASFDYIVREGKFGAVEGAVAKYMGAAAMYLISKRLKSRHRLQDNVREDLYEAADKWVAAVGKDRPFMGGQKPNLADLAVYGVLRVMEGLDAFDDLMQHTHIQPWYLRVERAITEASPAH

SEQ ID NO: 18416 - DNA, 2215 bp, Homo sapiens
  CDS (903)..(1568)
atacaagaaaaaaatcacatctttatgccaataccattctttcacaatactagaagaacagattcagagtagaattacataactggttggttacattttgcatccagtgagtaacaccatcatcttcttagtttctatatcaatttatttatttatttatttatttatttttgagaccaagtcttgctgtgttgcccaggctggagtgcagtagcacgaactcggcctcttcagtggccagtaccacaggcgtgcaccaccatgcctggctaatgttttttgtatttttggtagagacgggatttcactatgttgcccaggctggtctcgaactcctggcctcaagtgatgcgtccgccgtatctcaaaataataagagctatttatgacaaacccacagccaatatcatactgaatggacaaaaactagaagcattccctttgaaaactggcgcaagacagggatgccctctctcaccactcctattcaacacagtgttggaagttctggccagggcaatcaggcaggagaaagaaagaaagggtattcaattaggaaaagaggaagtcaaattatccctgtttgcagatgacatgattgtacatgtagaaaactccatcgtctcagcccaaaatctccttaagctgataagcaacttcagcaaagtctcaggatacaaaatcaatgtgcagaaatcacaagcattcctatacatcaataacagacaaagagagagccaaatcatgagtgaactcccattcacaattgctacaaagagaataaaatacctaggaatccaacttacaagggatgtgaaggacctcttcaaggagaactacaaaccactgctcaaccaagtaaaagaggaccaaacaaatggaagaacattccatgctcatggatgggaagaatcaatattgtgaaaatggccatactgcccaaggtaatttatagattcaatgccatccccatcaagctaccaatgactttcttcacagaattggaaaaaactactttaaagttcatatggaaccaaaaaagagcccgcattgccaagacaaccctaagccaaaagaataaagctgaaggcatcaccctatccaacttcaaactatactacaaggctacagtaaccaaaacagcatgctactggtaccaaaacagagatacagaccaatggaacagaacagagccctcagaaataataccacacatctacaaccatctgatctttgacaaacctgacaaaaacaagaaatggggaaaggatgccctatttaataaatggtgctgggaaaactggctagccatatgtagaaagctgaaactggatcccttccttacaccttatacaaaagttaattcaagatggattaaagacttaaatgttagacctaaaaccagaaaaaccctagaagaaaacctaggcaataccattcaggacataggcatgggcaaggacttcatgactaaaacaccaaaagcaatggcaacaaaactcaaaattgacaaatgggatctaattaaagagcttctgcacagcaaaagaaactaccatcagagtgaataggcaacctacagaatgggagaaaatttttaccatctacccatctgacaaagggctaatatccagaatctacaaagaacttaaacaaatttccaagaaaaaatcaaacaatcccatcaaaaagtgggcaaaggatatgaacagacacttctcaaaagaagacattcatgcagccaacagacacatgaaaaaacacatgcacacgtacattgactgcagcactatttacgatagcaaagacttggaaccaacccaaatcaatgatcgactggattaagaaaatgtggcacatatacaccatggaatactatgcagccaaaaaaaaggatgagttcatgtcttttgtagggacatggatgaagctggaaaccatcattctgagaaaactatcacaaggacagaaaaccaaacactgcatgttctcactcataggtgggaactgaacaatgagaacaccaggacacagggtggggaacatcacacactggggcctgtcgtggggtggggggagaggggagggatagcattaggagatatacctaatgtaaatgacgagttaacgggtgcagcacaccaacatggcacatgtatacatacgtaacaaacctgcatgttgtgcacatgtaccctagaacttaaagtataat

SEQ ID NO: 18417 - protein, 222 aa, Homo sapiens
MGRINIVKMAILPKVIYRFNAIPIKLPMTFFTELEKTTLKFIWNQKRARIAKTTLSQKNKAEGITLSNFKLYYKATVTKTACYWYQNRDTDQWNRTEPSEIIPHIYNHLIFDKPDKNKKWGKDALFNKWCWENWLAICRKLKLDPFLTPYTKVNSRWIKDLNVRPKTRKTLEENLGNTIQDIGMGKDFMTKTPKAMATKLKIDKWDLIKELLHSKRNYHQSE

SEQ ID NO: 18418 - DNA, 1518 bp, Homo sapiens
  CDS (17)..(1390)
cacttcccttcccgcgatggcggcacagggagctgctgcggcggttgcggcggggacttcaggggtcgcgggggagggcgagcccgggcccggggagaatgcggccgctgaggggaccgccccatccccgggccgcgtctctccgccgaccccggcgcgcggcgagccggaagtcacggtggagatcggagaaacgtacctgtgccggcgaccggatagcacctggcattctgctgaagtgatccagtctcgagtgaacgaccaggagggccgagaggaattctatgtacactacgtgggctttaaccggcggctggacgagtgggtagacaagaaccggctggcgctgaccaagacagtgaaggatgctgtacagaagaactcagagaagtacctgagcgagctcgcagagcagcctgagcgcaagatcactcgcaaccaaaagcgcaagcatgatgagatcaaccatgtgcagaagacttatgcagagatggaccccaccacagcagccttggagaaggagcatgaggcgatcaccaaggtgaagtatgtggacaagatccacatcgggaactacgaaattgatgcctggtatttctcaccattccccgaagactatgggaaacagcccaagctctggctctgcgagtactgcctcaagtacatgaaatatgagaagagctaccgcttccacttgggtcagtgccagtggcggcagccccccgggaaagagatctaccgcaagagcaacatctccgtgcacgaagttgatggcaaagaccataagatttactgtcagaacctgtgtctgctggccaagcttttcctggaccataagacactgtactttgacgtggagccgttcgtcttttacatcctgactgaggtggaccggcagggggcccacattgttggctacttctccaaggagaaggagtccccggatggaaacaatgtggcctgcatcctgaccttgcccccctaccaacgccgcggctacgggaagttcctcatcgctttcagttatgagctctccaagctggagagcacagtcggctccccggagaagccgctgtctgacctgggcaagctcagctaccgcagctactggtcctgggtgctgctggagaacctgcgggacttccggggcacactgtccatcaaggacctcagccagatgaccagtatcacccaaaatgacatcatcagtaccctgcaatccctcaatatggtcaagtactggaagggccagcacgtgatctgtgtcacacccaagctggtggaggagcacctcaaaagtgcccagtataagaaaccacccatcacagtggactccgtctgcctcaagtgggcaccccccaagcacaagcaagtcaagctctccaagaagtgagcagcctggcccctgctgccggacctgagcctcctggctcccagcctgtaaatatgtatagacctgttttgtcatttttttaataaagtcagttctggtggccctggactttggaggggaagggg

SEQ ID NO: 18419 - protein, 458 aa, Homo sapiens
MAAQGAAAAVAAGTSGVAGEGEPGPGENAAAEGTAPSPGRVSPPTPARGEPEVTVEIGETYLCRRPDSTWHSAEVIQSRVNDQEGREEFYVHYVGFNRRLDEWVDKNRLALTKTVKDAVQKNSEKYLSELAEQPERKITRNQKRKHDEINHVQKTYAEMDPTTAALEKEHEAITKVKYVDKIHIGNYEIDAWYFSPFPEDYGKQPKLWLCEYCLKYMKYEKSYRFHLGQCQWRQPPGKEIYRKSNISVHEVDGKDHKIYCQNLCLLAKLFLDHKTLYFDVEPFVFYILTEVDRQGAHIVGYFSKEKESPDGNNVACILTLPPYQRRGYGKFLIAFSYELSKLESTVGSPEKPLSDLGKLSYRSYWSWVLLENLRDFRGTLSIKDLSQMTSITQNDIISTLQSLNMVKYWKGQHVICVTPKLVEEHLKSAQYKKPPITVDSVCLKWAPPKHKQVKLSKK

SEQ ID NO: 18420 - DNA, 2245 bp, Homo sapiens
aaaccctatgaatgtataaaatgtggcaaagcctttagatgttccagagtcctcagagtccatgaaaggactcacagtggagaaaagccctatgaatgtaaacaatgtggtaaagccttcaaatattctagtaacctatgtgagcatgaaagaactcacactggagtgaaaccttatggatgtaaggaatgtggtaagtcgtttacttcttccagtgcccttcgaagccatgaaaggactcatactggagaaaaaccctatgaatgtaagaaatgtggtaaagccttcagttgttccagttcccttcgaaagcatgaaagagcttatatgtggtaaaaaacaacaacaacaaaacacctctgtcaatgtaagaagtgtgttaaagctttcagttattctagtttcattagaacacgtgaaaaaattaaaaactcaaattagagagaaacccaacacatgtaaggaagattagaatgtatgcaattttcctagttcccttctaaaacttagaaggacccgtcctgggaaagaacgtcataaaatacgaaaaatgtgttagaacactttattttcccagccgctttcaaatatatttttatcagtggttcattgttaaagaaggtgtctatactttagattttcagttttttgcagggaatcatggagctgagaatttcacagatactttataagccatagtacatgagcttaataggctgtgttttgtttctcatcagttaacataatttttgtctattcatttaaaaatttgttggatccctagactaagttgaaatgtatttctaatagtaggcaattttaattttcatgtagttgtttaattgttctctaattaatggaccaatgaaaaatgagttcatgtgtgtgtgtgtgtgtgtgtgtgtgtgtgtgtattctacctttttatgggaaaactacttttttgttgtaaagattttcttctgttttctttgctaataaagaattgttattaatttgcatgtatgtgaagtttatatagtctcatgtacattgttattttcattttctttcctttattctgtcatgagttttggctgttacttgcatagttcactttttttaaaaaatgttatgtttttagagagggtctcactttgtcagctaggctgaagtgtagtggtaataatagtcttagctcactgcagcctcaaattcctgggctcaagtgattctcccaccttagcctcctatgtagctggagctacagacacatgccaccatgctcagctaattatataattttaaaaattttttatagagatgggatctcgctgtattgtctaggctggtattgaattcctggcctcaagctatcctcctgcctcagcctgtctacatgttggggttactgacatgagctaccacacctggcccactttttactttgaattaagaagagagaactgtgattggacagtatgcttgtctaatctgcgtgtgaaagcattcagtctcaccatcaagtatattgtggatttttcataaatattctcaaacaggctcaggaagttttcttgtgttttttatttattgtttcatggtaaaggagtgttgaactcttatgacatgtttttttctgcatctattgagatgatttgtggtttttggcattctactgatagtctattacgttaactggctttcagatataaatatattatggttatctgggtgaaatttgtcttcatcatggaatataagtattttatctacaggttgaacatctgtaaaccccagattccaataccaaatctgaaatgctccgaagtcaaaaactgtttgagcaccagtcttatgctcaacagaaatgctcattagaggatttttgatatttggattagggatgctcatccagtaagttttctgcaaatattccaaaatgttaaaagtctgaaatccaaagcacttccgttcccaagtatttcagataagaaacactcaacccatattgataacgttcaattttccagtgtattgttggggccttttgcatttatagtcaaattggtgtgccctagtataccatatagtatagcatcatctgtatatatggcatgtctacatgtatacttatatgtgtataagtagctatataatatgtggtatagtacagttttgtaagttactatgaattatgcataactagtttatattatgtgtaattagcactacaataaattgtatattacaggattatggcatt

SEQ ID NO: 18421 - DNA, 3488 bp, Homo sapiens
taaaaagcattaggcatataaatgtataaatatattttatcatgtacagtacaaaaatggaaccttatgcatgggccttaggaatacaggctagtatttcagcacagacttccctgcttgagttcttgctgatgcttgcaccgtgacagtgggcaccaacacagacgtgccacccaaccccctgcacacaccaccggccaccaggggcccccttgtgcgccttggctttataactcctctgggggtgatattggtggtgatcacagctcctagcataatgagagttccatttggtattgtcacacgtctcctgcctcgcttgggttgccatgtttgagcgatggccctgttgatttcaccctgccttttactgaatctgtaaattgttgtgcaattgtggttatagtagactgtagcacattgccttttctaaactgctacatgtttataatcttcatttttaaagtatgtgtaatttttttaagtatgtattctattcatatggtctgcttgtcagtgagccagacttgcttactatattcctttataataatgctagccacttcctggattctttagtaatgtgctgcatgcaagaactttccagtagcagtgaaggagggctgcctctccaagcttcctaagggatgctgccctgtgtggggatgcattgcagaggcactagtagcatgggggctagagtggggagcgagatgtaaaagggtggggggataggagaattccagagtgcttccagcattagggtcctgagaacttctgagttcagagaaacatgcaaagtgactaacaaaatagctacttacctttgcagttctacagaccctgggagctgctttgggagtgagaaaggcaaccctccaatgtgtttcaactttaaaatgttgaattcttttcagacatggtatctcatttattctccttttctagcgtttgttgaatttcaggcagaatgtcttacagactgtcctagaaccagattatcatttaatctgaaacagctgaggaagggacagagaaggtacaagggcaaggcagcacaaaacagatcaggagaatgaagagggaatgctttggttttttgttttgttttgttttttctttttcaagtaactaaaacaacatctacatgtagagtgttgtggagagctgagaccagggtaaagtcaagtgcagcatcagtactgcgagacccaccagcccctggagagggtcagccgagaatctggtagtgaagcctgtctagggtcccggcaccctcaccctcagccacctgcagagaggccagggccccagagactagcctggttctgaagtgggcaggggtgctgccagagccctctgccccttatgttgagaccctgctttcaggacaggccagccgttggccaccatgtcacattctgagtgagtgtcacaggtccctaacaataattttctgatctggagcatatcagcagaatgcttagcctcaaggggcctggaagctgtaatgtttgatttatgatgagaactatccgaggccacccttggcctctaaataagctgctctagggagccgcctactttttgatgagaaattagaagagtacctaatgttgaaaacatgacatgcgctcttgggatctgctgttctctccagggctccagaacctgatacctgttaccaaagctaggaaagagctttatcacaagccttcactgtcctggcatgagaactggctgccaggctcagtgtaccccattaactgtgaatgaatctgagcttggtttcctttattgcttcctctgcaatatgattgctgaaacacattttaaaaattcagaagcttgtcactcctgttaatgggaggatcagtcacacatgtgtagtacaaggcggactttgtgtttgtttttggtgttaatttttagcattgtgtgtgttgcttccccaccctgaggagaggacaccatggcttactactcaggacaagtatgccccgctcagggtgtgatttcaggtggcttccaaacttgtacgcagtttaaagatggtggggacagactttgcctctacctagtgaaccccacttaaagaataaggagcatttgaatctcttggaaaaggccatgaagaataaagcagtcaaaaagaagtcctccatgttggtgccaaggacttgcgaggggaaataaaaatgttatccagcctgaccaacatggagaaaccccgtctccattaaaaatacaaaattagcctggcatggtggcgcatgcctgtaatcccagctactctggaggctgaggcaggagaatcgcttgaacccaggaggcggaggtcgcagtgagccgagatcatgccagtgcactccagcctgggtaacaagagtgaaactccgtgtcaaaaaaaaaaaaaaaaaatgttactcatcctctctgaaagcaaaaaggaaaccctaacagctctgaactctggttttatttttcttgctgtatttgggtgaacattgtatgattaggcataatgttaaaaaaaaaaaatttttttttggtagaaatgcaatcaccagtaaagaggtacgaaaaagctagcctctctcagagaccggggaggcagagtactactagaggaagtgaagttctgatggaatcatgcctgtcaaatgaggtcttgaagcggatgcccaaataaaagagtatattttatctaaatcttaagtgggtaacattttatgcagtttaaatgaatggaatattttcctcttgtttagttgtatctgtttgtatttttctttgatgaatgattggtcatgaggcctcttgccacactccagaaatacgtgtgcggctgcttttaagaactatgtgtctggtcacttatttctctaaaattatctcattgcctggcaatcagtcttctcttgtatacttgtcctagcacattatgtacatgggaaatgtaaacaaatgtgaaggaggaccagaaaaattagttaatatttaaaaaaatgtattgtgcattttggcttcacatgtttaactttttttaagaaaaaagttgcatgaatggaaaaaaaaatctgtatacagtatctgtaaaaactatcttatctgtttcaattccttgctcatatcccatataatctagaactaaatatggtgtgtggccatatttaaacacctgagagtcaagcagttgagactttgatttgaagcacctcatccttctttcaatgcgaacactatcatatggcattcttactgaggattttgtctaaccatatgttgccatgaattaactctgccgcctttcttaaggatcaaaaccagtttgatttgggaatcttcccctttccaaatgaaatagagatgcagtacttaactttccttggtgtttgtagatattgccttgtgtattccacttaaaaccgtaatctagtttgtaaaagagatggtgacgcatgtaaataaagcatcagtgacactct

SEQ ID NO: 18422 - DNA, 3040 bp, Homo sapiens
  CDS (4)..(2457)
gaaatggggcccccagacgtggaggaggaggagggaggaggccagggggaggaagaggaggaggaagaggaggatgaagaggccgaggaggagcgcctggctctggaatgggccctgggcgcggacgaggacttcctgctggagcacatccgcatcctcaaggtgctgtggtgcttcctgatccatgtgcagggcagtatccgccagttcgccgcctgccttgtgctcaccgacttcggcatcgcagtcttcgagatcccgcaccaggagtctcggggcagcagccagcacatcctctcctccctgcgctttgtcttttgcttcccgcatggcgacctcaccgagtttggcttcctcatgccggagctgtgtctggtgctcaaggtacggcacagtgagaacacgctcttcattatctcggacgccgccaacctgcacgagttccacgcggacctgcgctcatgctttgcaccccagcacatggccatgctgtgtagccccatcctctacggcagccacaccagcctgcaggagttcctgcgccagctgctcaccttctacaaggtggctggcggctgccaggagcgcagccagggctgcttccccgtctacctggtctacagtgacaagcgcatggtgcagacggccgccggggactactcaggcaacatcgagtgggccagctgcacactctgttcagccgtgcggcgctcctgctgcgcgccctctgaggccgtcaagtccgccgccatcccctactggctgttgctcacgccccagcacctcaacgtcatcaaggccgacttcaaccccatgcccaaccgtggcacccacaactgtcgcaaccgcaacagcttcaagctcagccgtgtgccgctctccaccgtgctgctggaccccacacgcagctgtacccagcctcggggcgcctttgctgatggccacgtgctagagctgctcgtggggtaccgctttgtcactgccatcttcgtgctgccccacgagaagttccacttcctgcgcgtctacaaccagctgcgggcctcgctgcaggacctgaagactgtggtcatcgccaagacccccgggacgggaggcagcccccagggctcctttgcggatggccagcctgccgagcgcagggccagcaatgaccagcgtccccaggaggtcccagcagaggctctggccccggccccagtggaagtcccagctccagcccctgcagcagcctcagcctcaggcccagcgaagactccggccccagcagaggcctcaacttcagctttggtcccagaggagacgccagtggaagctccagccccacccccagccgaggcccctgcccagtacccgagtgagcacctcatccaggccacctcggaggagaatcagatcccctcgcacttgcctgcctgcccgtcgctccggcacgtcgccagcctgcggggcagcgccatcatcgagctcttccacagcagcattgctgaggttgaaaacgaggagctgaggcacctcatgtggtcctcggtggtgttctaccagaccccagggctggaggtgactgcctgcgtgctgctctccaccaaggctgtgtactttgtgctccacgacggcctccgccgctacttctcagagccactgcaggatttctggcatcagaaaaacaccgactacaacaacagccctttccacatctcccagtgcttcgtgctaaagcttagtgacctgcagtcagtcaatgtggggcttttcgaccagcatttccggctgacgggttccaccccgatgcaggtggtcacgtgcttgacgcgggacagctacctgacgcactgcttcctccagcacctcatggtcgtgctgtcctctctggaacgcacgccctcgccggagcctgttgacaaggacttctactccgagtttgggaacaagaccacagggaagatggagaactacgagctgatccactctagtcgcgtcaagtttacctaccccagtgaggaggagattggggacctgacgttcactgtggcccaaaagatggctgagccagagaaggccccagccctcagcatcctgctgtacgtgcaggccttccaggtgggcatgccaccccctgggtgctgcaggggccccctgcgccccaagacactcctgctcaccagctccgagatcttcctcctggatgaggactgtgtccactacccactgcccgagtttgccaaagagccgccgcagagagacaggtaccggctggacgatggccgccgcgtccgggacctggaccgagtgctcatgggctaccagacctacccgcaggccctcaccctcgtcttcgatgacgtgcaaggtcatgacctcatgggcagtgctgagagcagagagaagctcatctcgctgttggctcgccagtgggaggccctgtgtggccgtgagctgcctgtcgagctcaccggctagcccaggccacagccagcctgtcgtgtccagcctgacgcctactggggcagggcagcaggcttttgtgttctctaaaaatgttttatcctccctttggtaccttaatttgactgtcctcgcagagaatgtgaacatgtgtgtgtgttgtgttaattctttctcatgttgggagtgagaatgccgggcccctcagggctgtcggtgtgctgtcagcctcccacaggtggtacagccgtgcacaccagtgtcgtgtctgctgttgtgggaccgttgttaacacgtgacactgtgggtctgactttctcttctacacgtcctttcctgaagtgtcgagtccagtcctttgttgctgttgctgttgctgttgctgttgctgttggcatcttgctgctaatcctgaggctggtagcagaatgcacattggaagctcccaccccatattgttcttcaaagtggaggtctcccctgatccagacaagtgggagagcccgtgggggcaggggacctggagctgccagcaccaagcgtgattcctgctgcctgtattctctattccaataaagcagagtttgacaccgtc

SEQ ID NO: 18423 - protein, 818 aa, Homo sapiens
MGPPDVEEEEGGGQGEEEEEEEEDEEAEEERLALEWALGADEDFLLEHIRILKVLWCFLIHVQGSIRQFAACLVLTDFGIAVFEIPHQESRGSSQHILSSLRFVFCFPHGDLTEFGFLMPELCLVLKVRHSENTLFIISDAANLHEFHADLRSCFAPQHMAMLCSPILYGSHTSLQEFLRQLLTFYKVAGGCQERSQGCFPVYLVYSDKRMVQTAAGDYSGNIEWASCTLCSAVRRSCCAPSEAVKSAAIPYWLLLTPQHLNVIKADFNPMPNRGTHNCRNRNSFKLSRVPLSTVLLDPTRSCTQPRGAFADGHVLELLVGYRFVTAIFVLPHEKFHFLRVYNQLRASLQDLKTVVIAKTPGTGGSPQGSFADGQPAERRASNDQRPQEVPAEALAPAPVEVPAPAPAAASASGPAKTPAPAEASTSALVPEETPVEAPAPPPAEAPAQYPSEHLIQATSEENQIPSHLPACPSLRHVASLRGSAIIELFHSSIAEVENEELRHLMWSSVVFYQTPGLEVTACVLLSTKAVYFVLHDGLRRYFSEPLQDFWHQKNTDYNNSPFHISQCFVLKLSDLQSVNVGLFDQHFRLTGSTPMQVVTCLTRDSYLTHCFLQHLMVVLSSLERTPSPEPVDKDFYSEFGNKTTGKMENYELIHSSRVKFTYPSEEEIGDLTFTVAQKMAEPEKAPALSILLYVQAFQVGMPPPGCCRGPLRPKTLLLTSSEIFLLDEDCVHYPLPEFAKEPPQRDRYRLDDGRRVRDLDRVLMGYQTYPQALTLVFDDVQGHDLMGSAESREKLISLLARQWEALCGRELPVELTG

SEQ ID NO: 18424 - DNA, 2861 bp, Homo sapiens
  CDS (1215)..(2069)
agcttccacccgtcctagccagggtgagaccaccctgcctgctggtggagccaggcgggcccagagcccacctggaagatggaggctgcacggcactgcgtggtccggggcagccccagggcagcagagcattccctggccttccctgctggtgccagctccttaccacagagacgccgcgtggaactcactactggcgatcgtggacgccccaggaaggcgagtggcacgaggtgtggcggggctgccacaggcagtcacggagcacccgctggtgccaggctcacccctcagatacagcctcgtgggctggctcagtggcggccctgactctccaaggtctgaggtctgctctgtcttccattccatgactcacaggaggttcaaggttacttccactgtggcagctgcctccctcctccctctccaggatggaaggaggtcctgctgtgcaaacctgcctggctgtccccttccgggacacggacggggggtttcctggcagttcctggtcctcccttgagggctaagggtccccccgttctgtggccgcctccagcacatccacccagagtccctgggcgtgaacacagccgctggggacgatcaccgcctgcccagcgtgcagccctggggctgcgtccttatctccgctcctcctgcctcctgcccagctgttcaacgtctacccatggctcggggccctgctccagctgcaccggcccgtcctgcgcaagatcgaggaggtccgtgccattctgaggaccctcctggaggcgcggaggccccacgtgtgcccgggggaccccgtgtgcagctatgtggacgccctgatccagcagggacaggtgtgtcgggacccaagacctccttgaaggcctgtaggggtcctgagggacaccccaggggagcacggctggggaggggtccataccggtcctgcaccaagctccctacctcctggctgggggcctctcagagcctcagtctccttgtctgtgaaacggggcatccatagtgcctgcctcggggacgctgagggatggctgagcccagatcaccggggcatccatagtggagcccagggctgggctgggtctgtggggtgggggacagaccccagatcatcccacgagccctgccccacgcctctgcagggggatgaccccgagggcctgtttgctgaggccaacgcggtggcctgcaccctggacatggtcatggccgggacggagacgacctcggccacgctgcagtgggccgcacttctgatgggccggcacccggacgtgcagggccgggtgcaggaggagctagaccgcgtgctgggccctgggcggactccccggctggaggaccagcaggctctgccctacacaagcgccgtgctccacgaggtgcagcggttcatcacgctcctgccgcccggcctcccgctgacccacgcgcaggatctcactccagccacgtccccagctggaccccgacctcggccccccaccgctgtggaccctgatgcagagcccaccctgctgcgtgagccccaggccaccgtggtcttcaccacccatgtgcccacgctgggccgctatgccttcctgctgcaattgtatactgggggtgaagctgcctgggagctgaagctgcctcccccgcagtgtgggctgccctccagggtgccaggacccagctccgagatgtccgggccaagaaggaccagctggaggcgcacatccaggcggcgcaggccatgcttgccatggacacagacgagacaagcaagaagatcgcacatgccaaggctgtggctgctgaagcccaggacaccgccacccgtgtgcagtcccagctgcaggccgccgcgtctgtgttggggagcgcctggccaggaccgagctcttcctgctgtttgccggcctcctgcagaggtaccgcctgctgcccccgcctggcgtcagtccggcctccctggacgccacgcccgcccgggcttttaccatgaggccgagggcccaggccctgtgtgcggtgctcaggccctaggagctcccccagcccccaggtcctcctgaccactcccctcccagccctgggtcctcccaccctctctcctcccaccccacagctcggactgctctgggagggccctgaggactcccaccctcacccccacccccacagggtcagcaactgcttccggttacacccaggactacccctgcccgaccctgtgggacccccacccctctgatgctgtctgcagctcagtccctgccagcccccaggagcgcctccagggccccgcccactctcccacccctgaagctgcactcccacccacctagctccccccagggccccccagcacctacagctggggctgcagggagacaacgggtggctgcatccagccagagacaggcgcaggtgggtgtcctcagcgtgcgagccctgcaccccccaggtcctgggactcctgcagaccccactccattcccgctcctggaacacttcctgcagctgtgcctggaggcagtcggcctgcagtgccagactctgagccaagccactggggccatgcgtatgactggtgcagggaggcaaggcccacattctccttcagagacaggcactggcgccagaggcttccttggggcggggggagggcacctcagcccctgaagacaagcagcactgcagtggcaaaaatggaaacactgacccggtgcggtggctcatgcctgtaatcccagcactttgggaggccgaggcaggcgaatcacgaggtcaggagttcgagaccagcctgcccaacatggtgaaaccctgtctctactaaaaatacaaaaaaattaaccgag

SEQ ID NO: 18425 - protein, 285 aa, Homo sapiens [sequence omitted]

SEQ ID NO: 18426 - DNA, 1398 bp, Homo sapiens
tttatattttacccaaacaattagtaaactggtagttgaaaaggaaaggattaagtaatgtagtttctttctccacattctgctgctgcttgaatcccattccaaaacagtttagcatcatatattattaccactctctgaatatcactgttgttgatatgcttaacataccttgatcttcaaaaaggaaaaaaagcgagaaagagaatgagttttggggagttgtctcttttgtctttacatgacacaaagcatgaaacatgttttctttttcagcagtcctttgccatgtgttatgactgaatgttgctccccaaataccatcacaccgggggttagagcttcaacctccagtatgatggtattgaggttagagcttcaacctccagtgtgatggtatcggggttagagcttcaatctccagtgtgatggtactgcggttagagcttcaatctccagtgtgatggtatcggggttagagcttcaatctccagtgtgatggtatcggggttagagcttcaatctccagtgtgatggtactgcggttagagcttcagtctccagtgtgatggtatcggggttagagcttcaatctccagtgtgatggtatcggggttagagcttcaatctccagtgtgatggtactgcagttagagcttcaatctccagtgtgatggtattagggttagatcttcaatctccagtgtgatggtatcagggttagagcttcagcctccagtgtgatggtatcagggttagagcttcagcccccagtgtgatggtatcggggttagatcttcaatccccagtggtggtggttagagcttcaatctccagtgtgatggtattggggttagagcttcaatctccagtctgatggtgtttcgggatggggcttttaagatgtaattagggtttaagatcataagggacctggtctgatggggattagtaggcttatatgaagagacacaagagggcttgctctatctctgactctcccacacacaaagtagaggccatgttagcctatggagagaagatggccatctgcaagccaggaagaaagccctcactagaaaccaaaccctgcaaaaccttaatcctggactcccagccttcagaactgtgagaaaatttatttctgttgtttaagccacccagtctatggtattttgttctggcagcccaagcagactaagacaccatgttcagacagaatttgaaaattacttttaagtttgcaccagaatgtaactacatttgatatttaaggggcaaaagcaggtgtagagtttgtaggaaacctttatgttatttaatccctgtaatcatggtaccctcttgagagtttacatgtttgaaatatttaaatttaactcactcatgatttttttc

SEQ ID NO: 18427 - DNA, 1810 bp, Homo sapiens
ataatgtgctgttcttgttattactgctattctgtgtcatcactctattccttctctactggatcattctcatcaacctaggatctctcttttttttttggagagagggtctcactctgtcactcaggctggagtgcagtggtgtgatcatagctcactgcagcctcgaactcctggcctcaatccatcctcctgcctcagcctccagagtagctgggaccgcaggtgtacaccaccatgcccacctaatttttttttaaaaaaaggccaggcatggtggctcacacttgtggtcccagcactttgggtggccgaggcaggcagatcatgaggtcagaagttcgagaccagcctgaccaacatggtgaaaccccgtctctactaaaaatagaaaaattagccgggcatggtggcacacgcctgtaatcacggctactcaggaggctgaggcaggagaatcgcttgaacctgggaggcaaaggttgcagtgagctgagattatgccactgcactccagcctgggcaacagagtgagactccgtctcaaaaatatatatatatatttttttgtaggaacaatctcactttgttgcccagtctggcctcgaactcctggcttccaccagtccgcccgccttggcctcccaaagtggtggggttataggcatgaggcaccgttcctggccatctagtatctcttaatcaaaaccactgtttatcctcacatcccttccctaactgtatccccatttcttggctataattctcaagagttgtttgcatatgcttctactttatctcccattcacaaccaccaacatagatacatctctgttttttttccacttttttgagtgagtagttttatttttttcctgaggagctgtatcaaagtatcataaactggatggcttagagcaacaaaaatttattttctcaatgttttggaggcgtgaaattcacaatcaaggtgtcagcatgtccatgctcttttgaaggctctgtagaagaatcctttgttgcttcttccaagcttctggtggttgctggtaattcttggcattcattggcttgtagctgtataactccaatctctgccttcatcttcacatgaccatcttctctctttgtgtatccatataatcatcatctttttttttcgagacaggacctcactctgtcacccaggctggagtgtggtggcacaatcacaactcactgcagccttgacctcccaggcttaggtgatctttccatcacaacctcctaagtagctgggactacaggtgttgcaacaccatgcccagctaatttttctattttttgtagagacaggactttgtcatgttgtcaggctggtctcgaactcctgggctcatgatccacctgcctcggcctcccaagtgctgggattataagtgtgagccaccgtgcccagtctgatctttacttcttatgaggacttgagtcattggatttggggcccaccttaatccagtataacctcatcttaattacttcggcaaagaccctgtttccaaataaggccatatttcacagataccagggtataggacttcatatcgttttgagggacacaattcaacacataacattagttaagcgtctcatggagttcggactggttggggtgataatatttgtttctttttaagaatgtgcatttcctgccaggcacagtggctcattcctgtagtaacagaactttgggaggccaaggcaggaggaggactgcttgagcccaggagttagaaaccagcctgggcaacagcaagaccctgtctccatt

SEQ ID NO: 18428 - DNA, 1602 bp, Homo sapiens
  CDS (166)..(702)
tctattgtgcggctgcaggaggtgtcgagcggcgttatttttttttgcggtttgcctttttttttctttttttttttttggaaccgcggttgtttaaaagcctgagggaacctggaggggggctcccactctctaccttctttcctccgagtttgtgactccgagatggacaaagtgtgtgctgtttttggaggctcccgaggcattggcagagctgtggcccagttaatggcccggaaaggctaccgactggcggtcattgccagaaacctggaaggggccaaagccgccgccggtgacctcggcggagatcatttggcatttagctgtgatgttgctaaagaacatgatgttcaaaatacatttgaagagatggagaaacatttaggtcgagtaaatttcttggtaaatgcagctggtattaacagggatggtcttctagtaagaacaaaaactgaagatatggtatctcagcttcatactaacctcttgggttccatgctgacctgtaaagctgccatgaggactatgattcaacaacagggagggtctattgttaatgtaggaagcattgttggcttaaaaggcaactctggccagtccgtttacagtgccagtaaaggaggattagttggattttcacgtgctcttgctaaagaggtagcaagaaagaaaattagagtgaatgtagttgcaccaggttagtgaaaactttattaaaataacttgattatgattattgttttatagggaagccattatttggaacattagtaattgacatctgggtagaatagtttgtaaaatgattgtgaaaagaatcaaataatgaactgggggactcaaaaaaattttttgtacctcatactctatataaagtctatgtgttagcctgtttgcattgctctaaaggactgtctgaggtaattcataaaaaaaagaggcttatttggctctcgggcctgcaggctgtacaagcatgacaccaacatctgctcagcttctggtgaggcccaggaaactttttttcagtcatggcggaaggtaaagaggtagcagccaagtcatatggggatagcaggagcaagagagagaggaggtggcaggctctaaacaaccagctctggcatgaactaacagtgagaactcattatttaccatgtggagggcaccaagctattcatgaggaatccgcctccatgacccaaacacctcccgctaggcccacctccaacattgggaatcacatttcaacatgagatttggaggggacaaacatccaaaccataagagtctttatttttaaattttgcactagtggaataacttaaggtggagagggtcttagaaataattttttccagtcatttttgtagattagaaaactgtacctgggattcagagtgacttgcctaagattacacagctagtttatggaagaactgttactaaaagctttgtcttttgatttccacctaatgggagcttaaaaataatgtcctaccaggtatggtagctcatgtgggaggctgaggcaggagtattgtgaggccaggagttccagatcagcctgagcaacatagcaagatgctgtctgtaccg

SEQ ID NO: 18429 - protein, 179 aa, Homo sapiens
MDKVCAVFGGSRGIGRAVAQLMARKGYRLAVIARNLEGAKAAAGDLGGDHLAFSCDVAKEHDVQNTFEEMEKHLGRVNFLVNAAGINRDGLLVRTKTEDMVSQLHTNLLGSMLTCKAAMRTMIQQQGGSIVNVGSIVGLKGNSGQSVYSASKGGLVGFSRALAKEVARKKIRVNVVAPG

SEQ ID NO: 18430 - DNA, 2956 bp, Homo sapiens
  CDS (2557)..(2955)
ttatttataaaatcagtagagagtactagcaatgcgtcattctattatagagaagcttgtactgtagtgagatgataatctcttagagaaaaggggaaggcaggagaggaagcggaatctgccagcttaaagtcacagcatccaaatacctcaagtcctcactccaggtgaaaggagtctatgcaaaactgtcccaaaaacctcacgattcctgcttctttcttcctccatgtgtcaaggttgaaaggaattctgccacttccacgtgcttctgttgttatatgtaccgtcattattttcctaccttatcccagcccccagctgcaaaacaaactgtcatttatcaaatacttgcctgaccccaaatgctgagatctagtataattttaagcatatacaaaaaagacaaaaacatccctactcaaatgtaatctgtttttgtgtctgacatcaacttttaaaatttattttttaattaattaattaattttttttaagagacagggtctcactgtattgctgggctggagtgcagtggcacaatcacggctcactgcagcctcaagcgcctgggctgaggcaatccttccatttcagccttccaagtagctgggactacaggagcacaccaccatgcccagctaatttttttaattttttgcagagacggggtctccctttgttgcccaggctggtctcaaactcctggtgtcaagcaatcctgctttcatcttccaaagtgctgggattacagtcatgagccaccatgcccagcctggcaccaacttttgagaatctaacatcccaactattggaagaaagctagaagattgctaaaggtcacatttagttaagagtttcttttctttttttttttttggtatcagaaatatgtcccacactcaagaaaaccctgtgaatctgtgccaggccagtgggtcgggattgattggcagggcagagcctctgcccagaagtggctggctgcatttctgcagtcttgcagcctgagcgccatgctcctggtcaaacatttagcacttgctgtggccatgttaccaccagacagaaacagagaagacaagctgtaaagaataatggccagccggagcatggtggctcacgcctgcaaccccaacactttgggaaggcaaggcgggtggatcacttgaggtcaggagtttgagatcagcctggccaacatggtgaaactaaaaacacaaaaattagctgggcatggtggaggggcacctgtaatcctagctattcaggaggctgaggcacaagaattgcttgagccagggaggcagaggttgcagtgagctgagatcgtgccactgcactccagcctgggcgacagagcaatattccatcccaaaaaaaagaaaaaagaacaatggccttaaaatgaaatacactaaaattgccaaaatgataccgtatcctcctatataaaagcaatgtaaagcgtggtttagattactttagacaatactatgacacttacagtataagtctaaagacttaccttaaggataaaatgagataggtataggatgtgtattaattgtttcataagccatatagatatgtacagttattacagattcaattttttttaaaaaaatacgtgtgtagctcacccttagaaatcagttaattatgaaaatgtgtgaaaatatagtcacaaattagcagatgattgtttatcttcttctttgtaaattgttaatcattgctatcgtgagttttagatggggctctaattttttcttagtaaacaggaagctatttagagcttggtttgtatggtatcttgaaaaaagtcattctgtatatgatagtatacagaaaaatgcatgaacaaactcctagccatctggaattagaggaaattctctgtttattattctggttaacaatttttagttttccatagatcactttataatttatagaggatgagaatacattgcatatgaaagtgcttttaattttaaaagattgaattgtgagtttctggattttgtattacctcaaagtaattattaggcaattaatcaccattctgcactgttacagactattttaactgatttgaatgtggttaggattctggataaatgagaggtatctataacataattggtatatctgtttttatgtctgttattagcatcctattttgggggattggcgtagtctaagcaatgtgtctgctaactttttctgtttcatttcctcatggagccttggattaccttttatgcagttaagtcaacattaaaaagtttcagtaggctgggtgcggtggctcacgcctgtgatcccagcactttggggtgaattgtggggtgattcaccatgaggagggtgaatcacttgaggccaggagttcaagaccagcctttccaacatggtgaaaccccatttctactcaaaatacaaaaattagccgagtgtggtggtgggtgcctgtaatcccagctacttgggaggctgaggcaggagaatcgcttgaacctgagaggtggaggttgcagtgagttgagatagatggcgccactgcactccagcctgggtgacatagtgaaactgtgtttcaaacaaaaaaaaaaaaaaaaaaaaagaagcagcagcttcagtaagcaccggagagccattgcctcctttccacggggaccagctggttccataacagctgcttttaggggcatctacatgatgctctgctgggaggtcacaaggtacatgagctatgctagggcaggggcctgctgtgagttctcttctgtcctccttgggaaggagaagaaggttggttactttgtgtatttcagtttttttgtccttctgtcattctcctgtagcagctgtcgtcacccctttgtcaaacatactagcccaaaatatggactgttagctgataagacaataagtcaaactcttaatcatt

SEQ ID NO: 18431 - protein, 133 aa, Homo sapiens
MAPLHSSLGDIVKLCFKQKKKKKKRSSSFSKHRRAIASFPRGPAGSITAAFRGIYMMLCWEVTRYMSYARAGACCEFSSVLLGKEKKVGYFVYFSFFVLLSFSCSSCRHPFVKHTSPKYGLLADKTISQTLNH

SEQ ID NO: 18432 - DNA, 3132 bp, Homo sapiens
ttaactccttacttgaaacatttagactatctagatgtttagaagtgcccgatgtatattaaatgtagaggtagtaaaataccaatttgtaaatatctttttgctaaaattcataggaaatacttttggaagttgaattgtgaagccacctttgtgagcagtatattactgtctatacttgctcaatggtttagaggaggtgggagggaagaaattgcaaaagataatatgctagtgtgttcatacttggacattttcagacaccatttttctgtatgttttgtgcattttgttttgctctgtatatagtgtatataatggacaaatagtcttaattttttaacatctagaggttgccagtgtatgacaaagtagtaaaattaacatattttgtatgctttgtgttgaaattcataggaaaacttgtcttctgtaattgacttttgcataggaatttgttcagccatctctaagcattacacatgcgtgtacttgtccactgaattgaaggcagagaaggaagagaagagggaatgattcaaggccaaaatggtcacatttagaagataccttagatgataaccattgttatgtgtgtgcagtttatttaacagtgccgtgtacatggtggacaagctatgaaatatctagtctttagatgtttggaagtgcttgatgtattttaaagtagtagtagtagaataacactttttgtaaatagcttttaaaaactgatgggaaatgctgtttggaagtggatttgttgaaccacctgggaggtgggagggaaaaaattgcaaaaggtgttttgccattgtttattagaaaatttcagcttaatccattgcctatatgttacaagcatttcatttaactttgctatactgtatatattgtgtatatactggacaaatgagtcctgattttataatatctagtctgtagctattaaagaggttgccagtgtatgacaaaagtagttagtaaactaacgcattttgtacactttgttaaaattcatagagaggctgtcttctgaaaaggactttttggaagtgaaatgataacatcagctcgaagtgacacatgtgcttatatccaccaggttggtggtggagaggagttggaaggaatgaagggttctagaccagaatgttcctatttagaagacactttcagatataaccattgttacatgtgtgtagtttattcaacagtgctatgtatatagtggacacacttaagtccttatttgaaatatctagtctttctagatgtttagaagtgcacaaagcatgttaaaagtagaggtagtaagtaacacattttgtagttattttgatatgaaatattgtcttggaaattgatcaattctctgagaagtacacgttatgatatttgtgctggttcagggggaagaaggagcacaaagttcaaagggctttctaccagtgtccagtgtgtttatgatgaggcacattgaccattgtcccttatgtctgcattttcgtttactgtgctgtgtatataagcagacataggagtcctaatttatatctagtcgatgttaaagaggttgccagtgtatggcaaaagtagagttagtaaactaatacattgagtacactttgtgttaaaattcataaggaacacttcttaaaaacagaagtaaaattgttaaacgccccccgcccccaagcattacagatggcttatagctgtcaacggggttggtagaggtcagaaagggaagtgttctaggccagaatgttcctagttagaagacactcaaattatagtctatgttatgtatatatgccatttattcaatactactgtgtatataatggaaaacttaggtgcagtttgaaacatctagtctttctaggtgtttaaaagtgcacaatggtcaggtgcggtggctcactcctgtaatcctggcactttgggaggctgaggtgggcagatcacgaagtcaagggatcgagactatcttggccaacatggtgaaaccccatctctacaaaaaatacaaaaattagctggtcgtggtggcacatgcctgtagtcccagctactcgggaggctgaggcaggagaatcgcttgagcccgggagacagaggttgcagtaagccgagaccacaccactgcactccagcatggcgacagagcaagactccatctcaaaaaaaaaaaaaaaaaaaaaaaattccacaacataggttaaaagtagagggctaaagtaacacccctctaagcatttgttttcagtacttcctaggagtggttgcatttgggaatggaattgttaaaacttgatgcttaggagcgtatgctgactattcactgcgtggtggggtggagaggaggaggaggtatgcagggagaagggttctgtgcccctgagttagattagttcagatggtctaaccattgttctatgtatgcattttattgtgttaatattgtgtattaaaggataaacaagtcttaatgctcaaagtatgttaaaaatagatgtagtgaatcagtccctttgtgaatgtcctattgttagtttttaggaaggcctgtcttctgggagtgacctttattagtccacttcttggagctagacgtcctatacttagtcactggggatggtgaaagagggagaagaggaagggcgaagggaagggctctttgctagtatctccatttctagaagatggttttagatgataaccacaggtctatatgagcatttttagtaaagtgcctgtgtttattgtggacagagtttattattttgcaacatctaacctttatgaatatctgaggtgacaatgtgtgataaaaactagagctagtgggccaggcgcggtggctcatgcctgtaatcccaacattttgggaggctgaggcaggcagatcacaaggtcaagagatcgagaccatcctggtcaacatggtgaaaccccatctctactaaaaatacaaaaattagctgggcgtggtggcgcgtgcctgtagtcccagcttctcaggaggctgaggcaggagaatcacttgaacctgggaggcggaggttgcagtgagccaatattgcgccactgcactccagcctgggcaacacagcaagactccatctc

SEQ ID NO: 18433 - DNA, 4369 bp, Homo sapiens
  CDS (179)..(2266)
tttgcatcccaataatacagccctttggcagaaataccttttattttgccagagccagtttagtaccttttcgatatcaaaaattcacagtctttatggaaaatgcttgagcactttgtctgctgttaaggacggcagcatcttatctcaccctgcgttgcctggcacggaagaggccatgtttgcactctttcttcagcagtgccactttctgcggcaggctggccactctgagaaggccatctcattgttccaggccatggtggacttcaccttcttcaaacccgacagcgtaaaagatctgcctaccaaaggacaggtggaattctttgaacccttttgggacagtggagagccccgggctggggagaagggagcccgaggctggaaggcgtggatgcaccagcaggaacgaggtggctgggtggtcatcaacccagatgaggatgacgatgaaccagaagaggatgaccaggaaataaaagataagactctgcccaggtggcagatctggcttgctgctgagcgttcccgtgaccagaggcactggcggccctggcgccctgataagaccaagaagcaaaccgaggaagactgtgaggatcccgagagacaggtgttgtttgatgatattgggcaatctttgatcagactttccagccatgatcttcagttccagctggtggaggccttcctgcagttcttgggtgtgccttctggctttactcctccagcctcctgtctttatctggccatggatgagaacagcatctttgataatggactttatgatgaaaagcccttgacttttttcaaccctttgttttctggggctagctgtgttggccgcatgggtaggttgggctatcctcgctggaccaggggtcagaaccgagagggcgaggagttcatccgcaatgtcttccaccttgtcatgcctttattttcaggcaaagagaagtcccagctctgcttctcctggttacagtatgagattgcaaaggtcatttggtgcctgcacactaaaaacaagaagagattaaagtctcaagggaagaactgcaaaaaactagccaagaatctccttaaggagccagaaaactgcaacaacttttgcctgtggaagcagtatgcacatctggagtggttgcttggcaacacggaggatgccagaaaagtttttgacacagcacttggcatggcaggaagcagagaactgaaagactctgacctctgtgagctcagtctgctctatgctgagctggaggtggagctgtcgccagaagtgagaagggctgccacagctcgagctgttcacatattaaccaagctgactgagagcagcccctatgggccctacactggacaggtgttggctgttcacattttgaaagcgcgaaaggcttatgagcacgcactgcaggactgtttgggtgacagctgtgtctccaatccagctcccaccgattcctgtagccgcctaattagcctggctaaatgcttcatgctcttccagtatttgaccatagggattgatgctgctgtgcagatatacgaacaggtgtttgcaaaactgaacagttctgttttcccagaaggctctggcgagggggacagtgccagctcccagagttggaccagtgttctcgaagccatcacactgatgcacacgagcctgctgagattccacatgaaagtgagtgtttacccgctggcccctctgcgagaggcactctcacaggctttaaagttgtatccaggcaaccaggttctttggaggtcctatgtacagattcagaataagtcccacagtgccagcaaaaccaggagattttttgacacaatcaccaggtctgccaaacccttggagccttggttgtttgcaattgaagctgagaaactgaggaagagactggtggaaactgtccagaggttagacggtagagagatccacgccacaattcctgagaccggcttaatgcatcggatccaagccctgtttgaaaatgccatgcgcagcgacagtggcagccagtgccccttgctgtggaggatgtatttgaactttctggtttccttaggaaataaagaaagaagcaaaggtgtattctacaaagcacttcagagttgcccttgggcaaaggtgttgtacctggacgccgtggagtatttccccgatgagatgcaggagatcctggacctgatgactgagaaggagctccgggtgcgcctgccgctggaggagctggagctgctgctggaggattagagagcagtgggaaaacgggctgtgcctgcgaggccaagttgcccaccctgcggagctaggaggcgcgagcagagaacgtgtgtgttaggagaactcggcttttgaaatgttctttctcgatagtaataatgtgggctgccagcctctcacatcttgcacactttttgggtgtgtaaatgacacaaaagttatttacatattatatatgtgaatatgtgtatatatgtacatagccagagagtcatgccacgtggtcattaaaccgatgatgattgaggcgtggcagcgtccttgctcattctctccctgtgcgcagccagcactggcccccgcacggtgaatgtgttccctccgctggtgtcgtggtggtcctgccaggccctctctgagataaaggtctggtttttcagcactaggatgtcttccccaggctggtgagcaggagattttgctcttgtgttgagacccgcagttaacgcttggtgttctggcctgcacgcagtgtgtggcaagttccctgagtttacctcggcggcgatgcctccgcctggagctggaggggcagcgtgccctggggctgctgaaaaactcaggcctgtggagtcagaacccgctcttcagcaggtcccaggccacttgagtgtggaaggctgcccggggcactggcagcctctgggggaagcctgctcccaagccgtctaggagccgagcacgctgtaccgccagccccagccctgcctgcatgaggggcccggcacgcttgtgcagcaacgctgcttacactatgaaggccaaggctggcccggttctggtgttgcattcgagggctgtgaacagaatgaaatgtcaacatccatttttcagacttgttctgcctccgaagagatttttagtgctgagtgattttcactattaacatatggctggaaggaatggttttcttatcttctccgagctctagactggctagcttctctctggctttttttgttttgttttcctctctttagaattgctgtatacttgtatctcctcagcacatttagaaaagccagtgtataattttggctggcaactgacggacgcagcgggcagcagcaggcagggcagcgcacgagagcacctcccagggcacggtgggaaactggccagcccagccccactactgccctctcctgctcgtccccagtccctgagctacaggtggctgtaggcagaagcccaccgggtgttccttagcgacagacaggtcgtcagctgctccccttgatgccttttcacagaaacaaccctcaacttgaggaagttgagagctccactccgaggtggacttgctccccctccctgagagctaactggcttgaactgtcatgagttcctggctgcccacaaagagggaccttctccacccttgtcctctgcgtggggcggacatcagccagacatgtcaccgacctgattgggggcagggagtaggaagtccaggaccaaaccatgctccccatgacagcagctggcgcctcagtccccatctgactcatgtctcttctcatctggttcagaacttagaagggcgtggcctctgatcagctggttccctccaaaccccagtggcaacctgtcccttgagagccaggaatggctcttagcagtgggcagtgagcccccgagaggataaagcggctgctcgaacagattgcgagcacattacttgctgcatgggaggaggtttaaaacaaatcaaagattccttgagggcattttacagaaaacaagatgtcaagagcatcactgttgttatttaaaagcccatttgaggccaggcgcggtggctcacgtctgtaatcccagcactttgggaggccgaggcggacggatcacgaggtcaggagatcgagaccatcctggctaacatggtgaaacccccgtctctactaaaaatacaaaaaattagccgggtgtggtggctggcgcctgtagtcccagctactcggaaggctaaggcaggagaatggcgtgaacctgggaggcagagcttgcagtgagccaagatcgcgccactgcactccagcctgggcgacacagcaagactccgtctcg

SEQ ID NO: 18434 - protein, 696 aa, Homo sapiens
MFALFLQQCHFLRQAGHSEKAISLFQAMVDFTFFKPDSVKDLPTKGQVEFFEPFWDSGEPRAGEKGARGWKAWMHQQERGGWVVINPDEDDDEPEEDDQEIKDKTLPRWQIWLAAERSRDQRHWRPWRPDKTKKQTEEDCEDPERQVLFDDIGQSLIRLSSHDLQFQLVEAFLQFLGVPSGFTPPASCLYLAMDENSIFDNGLYDEKPLTFFNPLFSGASCVGRMGRLGYPRWTRGQNREGEEFIRNVFHLVMPLFSGKEKSQLCFSWLQYEIAKVIWCLHTKNKKRLKSQGKNCKKLAKNLLKEPENCNNFCLWKQYAHLEWLLGNTEDARKVFDTALGMAGSRELKDSDLCELSLLYAELEVELSPEVRRAATARAVHILTKLTESSPYGPYTGQVLAVHILKARKAYEHALQDCLGDSCVSNPAPTDSCSRLISLAKCFMLFQYLTIGIDAAVQIYEQVFAKLNSSVFPEGSGEGDSASSQSWTSVLEAITLMHTSLLRFHMKVSVYPLAPLREALSQALKLYPGNQVLWRSYVQIQNKSHSASKTRRFFDTITRSAKPLEPWLFAIEAEKLRKRLVETVQRLDGREIHATIPETGLMHRIQALFENAMRSDSGSQCPLLWRMYLNFLVSLGNKERSKGVFYKALQSCPWAKVLYLDAVEYFPDEMQEILDLMTEKELRVRLPLEELELLLED

SEQ ID NO: 18435 - DNA, 1836 bp, Homo sapiens
  CDS (50)..(1165)
taaactttttaccaagctttttaaagatgacatcaggtatctgttgacaatggacaaactatggcggaaaaggaaacctccagttccgttggactgggctgaagtacaaagtcaaggagaagaaacgaatgcatcagatcaacagaatgaaccccagttaggcctgaaagaccagcaggttctagatgtaaagagctatgcacgtcttttttcaaagagcatcgagactttgagagttcatttagcagaaaagggggatggagctgagctcatatgggataaggatgacccatctgcaatggattttgtcacctctgctgcaaacctcaggatgcatattttcagtatgaatatgaagagtagatttgatatcaaatcaatggcagggaacattattcctgctattgctactactaatgcagtaattgctgggttgatagtattggaaggattgaagattttatcaggaaaaatagaccagtgcagaacaatttttttgaataaacaaccaaacccaagaaagaagcttcttgtgccttgtgcactggatcctcccaaccccaattgttatgtatgtgccagcaagccagaggtgactgtgcggctgaatgtccataaagtgactgttctcaccttacaagacaagatagtgaaagaaaaatttgctatggtagcaccagatgtccaaattgaagatgggaaaggaacaatcctaatatcttccgaagagggagagacggaagctaataatcacaagaagttgtcagaatttgggattagaaatggcagccggcttcaagcagatgacttcctccaggactatactttattgatcaacatccttcatagtgaagacctaggaaaggacgttgaatttgaagttgttggtgatgccccggaaaaagtggggcccaaacaagctgaagatgctgccaaaagcataaccaatggcagtgatgatggagctcagccctccacctccacagctcaagagcaagatgacgttctcatagttgattcggatgaagaagattcttcaaataatgccgacgtcagtgaagaagggagaagccgcaagaggaaattagatgagaaagagaatctcagtgcaaagaggtcacgtatagaacagaaggaagagcttgatgatgtcatagcattagattgaacagaaatgcctctaaacagaaccctcttactatttagtttatctgggcagaaccagattgttatgtcctttgttccaaagggaaaaaattgacagcagtgacttgaaaatgattctgctccctttgaaagcattcattttgctagaactgttagacacattgcagtatgctgtattgaaagtaggaatatagttttaaaaccctttgaacaaagtgtgtgcataaccagtcatgagataaaacaacacaatgcatgttgcctttttaatgtaaatacccttaggtatcattaatagtttcaaaatattgtggtttagtaaagttgatacctggttataaatattatgcctttatttttggctagaagaagaattatttttagcctagatctaaccattttcatactcttaactgattgaaacagattcaaagaagtatcgagtgctatgcattgaaacttgtttttaaatgttagatggcactatgtatattaatgtaaaacaatgttaatttactcaagttttcagtttgtaccgcctggtatgtctgtgtaagaagccaatttttgtgtattgttacagtttcaggttatttatattcgatgttttgtaaaactcaaataacgactatacttatggaccaaataaatggcatctgcattcttgtt

SEQ ID NO: 18436 - protein, 372 aa, Homo sapiens [sequence omitted]

SEQ ID NO: 18437 - DNA, 1657 bp, Homo sapiens
  CDS (546)..(1655)
ttgttggctggtgtgtgggtgtcaaactgagccagacgcggcggtggcggcggctccgcgggctacggtcgctcccgcctctcgagcgctgccggtggccgcagcggcgcacccacgccggcccggaggagcagagtgttcatttctgtgtcgggcacagtgctaagtgctgggtgctcactggtgatgaggcagatgaaggttaccaaacttgtggacaggagcctcatatcagagacgtggacctcactgtagcctggtcatggcttccagcttttcgaatctgaggctccaaaggaggaaatgaccattcagggatcttactccagcttgattacggggactggaccttcatagggtgcgcacttaccaaggacaggaaggtttctctgtttgaagggctttaaacttataacaaagaaaataaaaatgacgacttcgtctatcagacggcagatgaaaaaatcgtgaacaattactcagaggcagaaatcaaagtccgggaagccacctccaatgacccgtggggcccgtccagttctctgatgaccgagattgccgacctgacctacaacgtggtggccttctcggagatcatgagcatggtgtggaagcggctgaatgaccatggcaagaactggcggcatgtgtacaaggcgctgaccctgctggactacctcatcaagacaggctccgaacgtgtggcccagcagtgccgggagaacatcttcgccatccagaccctgaaggacttccagtacattgaccgagatggcaaggaccagggcatcaatgtgcgtgagaagtcaaagcaactggtggctctcctcaaggacgaggaacggttgaaggctgagagggcccaggctctcaaaaccaaagagcgcatggcccaggttgccactggcatgggcagcaaccagatcacctttgggcgaggctccagccagcccaacctctccaccagccactcggagcaggagtatggcaaggccgggggctccccggcctcctaccatggctccacctccccgcgagtgtcctccgagctggagcaagcccggccccagactagtggagaagaggagcttcagctgcagctggcacttgccatgagcagagaagtggctgagcaggaagaacgcctcaggcggggtgatgacctcagattacagatggccctggaagaaagccgaagggacacagttaaaattccaaaaaagaaagagcatggctctctcccacagcagactacgctgttggatttaatggatgctctccccagctcgggccccgcggcccagaaagcagagccctggggcccgtcagcctccactaaccagaccaacccctggggcgggccagcggctcctgcgagtacttcagacccctggccatcgtttggtaccaagccagctgcctccattgacccatggggggtgcccactggagccaccgcacaatctgtccccaagaactcggacccctgggcagcttcacagcagcctgcctccagtgctgggaaaagagcttctgacgcgtggggcgcagtctccaccaccaagcccgtgtctgtctctgggtcctttgagctcttcagtaatctgaatggtacaattaaagatgacttttctgaatttgacaaccttcggacttc

SEQ ID NO: 18438 - protein, 370 aa, Homo sapiens
MTEIADLTYNVVAFSEIMSMVWKRLNDHGKNWRHVYKALTLLDYLIKTGSERVAQQCRENIFAIQTLKDFQYIDRDGKDQGINVREKSKQLVALLKDEERLKAERAQALKTKERMAQVATGMGSNQITFGRGSSQPNLSTSHSEQEYGKAGGSPASYHGSTSPRVSSELEQARPQTSGEEELQLQLALAMSREVAEQEERLRRGDDLRLQMALEESRRDTVKIPKKKEHGSLPQQTTLLDLMDALPSSGPAAQKAEPWGPSASTNQTNPWGGPAAPASTSDPWPSFGTKPAASIDPWGVPTGATAQSVPKNSDPWAASQQPASSAGKRASDAWGAVSTTKPVSVSGSFELFSNLNGTIKDDFSEFDNLRT

SEQ ID NO: 18439 - DNA, 2643 bp, Homo sapiens
  CDS (328)..(690)
taaaataaatagggctttagttcttaagtaattctataggattttaccctgaaatccagggtgttcagatttcaaaaaggataatttatcagtattttctcatccagtcaaacttcagctgacattgatacaggtcaaaatgcgtagatgctttttggtgttggaaataagtgtctgtcttatggtcatcattgtcttcttagatttttggataggggggccaggtagggggagactcagaaataaaagcgttccccagataacttcaatctggaaagaattttttgtatagagtccatctctccctcaagactgaccacaggtttcatgagaaggtccctgaaaacatcacatttctctgaagaaccatcaacttgtcttttcttgaaccacaggaatggttctacagaccctactataattcttcacatttcagaacccatgtttaatggagggaagagagaaatgcatgggaaaagaacacctccttttctcctttctcttaaattcaaagacgtttgctttggaatgccctcacttctccctattcacaggcttctaaaatcattaatttactcaaggcacatgtgccttctttgccccaaatgcatcactttccttttagttatggctgattttgggtgtgtgtgtgtaagacatgcagtcaacaacgagatgaaggccattgcatagatctcatgcagatagtgatggattcagaaagtaggttccagtggcgtcactaccttcttgtaagccagtatacactggctatttgtggaaatctctttgggagatcaaatagagtattatgccactgtgagtgtttataaactggaaggaacaagtacctgtgtttcttgggacacaaagcactcagatcctgagtggatgcagacatgagagtaaatgtcagcccaaattaggcccctcgacctacagacatttcatgggttttatttaatcacaccccatggtttggggctacatgaggaagttggtaatgagctgaatttcttattcagtggaaaaaactgaaactgtctaaaaacacgggatatattttagaggcaattgtggaagcggagagaatgagatgatggtgttcagagggaccagcttctttttcagttgtctttagaactcaagaataatcaataatttagtgccccttcaacagccatactcagcaagaagaatcagaagcttgatcctctaacagaaatagaagagggtagctttgcccattgccactgtctttactgccccttctgcccctccacccacatccacattcagcatcactccaaggatgtgtcagcatcttgcccatgcaggtagaaatttgtgagtaggcctccatacttcctcgggggaagaaagagaaactagtgctggttttaagaatgtagctggcttttcatcagaacccttacgctaacctgaccacacttgctctcggggaagttcaagcctgtgatgtgcataaactccaacaagcctggctttggtgttcagcatgcacattccataaatatctcttgcaggcataccccacagctagactgcaggattaaaataacttccaaaaggtgctggattggagtttgttcaaatttctcattaaccactaatgttaattcataccaaatgcaaagtattctaaaccagctgatgctgtcagtgttcaagttttaagtgacttcaaacacaatggaagtgtttcaatgggagccagatctcatgagtaaaaatccattttataatagctctgtgatatatcagtgggagatgattcataggggagagatttgaacaagcagaattaagtgttagcaaaaatgctgcattgctttgattcatgtttaaagacctaaatttctatgcacaaggaataaagggcctacttaccaagtgtaaatcacaacataggctaccaaaatatttcttatttgctaggagaacaaagctgtcacggtgcatgatagttggacagagatggctaaaaaagaggcaaattcagatttggaaacagggtggcctcttcattatttattgccaagatctgaaaatcttcaacatcttataagacaacaatgaagtagcccctgaacagcatggagttgctgtgagtttgttcgttgcagacctttgtgttgggtcctgggaatctgagctttgttccctgtgcatggtggataattgaaaccaagaggacatgggatagaccttgtgacagaccaattctgtgacccctgtcttctgggtcacattattcattgttgatttaaatacaggactaccaaacagtacaaatctatcatgagtctggtagaaaagtaaaagtaaaagctgcacacgttacatactgtttattgttctaatgtacaactaactatttgcatataatgtgatttaatttattgctgttttgtgtagaaaaggagaactaatgactgtggatataacccatgttttgtataatatattttatttcttgtgcgaactggtcatttaaaatatctacttcatttgatgtttggatataaatgtgtatgtgtccttgtaaatgtttctatcaagcaagaatgccacgtactcagagtataacaatgtgttctcattaaaaaatacatcccacgg

SEQ ID NO: 18440 - protein, 121 aa, Homo sapiens
MRRSLKTSHFSEEPSTCLFLNHRNGSTDPTIILHISEPMFNGGKREMHGKRTPPFLLSLKFKDVCFGMPSLLPIHRLLKSLIYSRHMCLLCPKCITFLLVMADFGCVCVRHAVNNEMKAIA

SEQ ID NO: 18441 - DNA, 3181 bp, Homo sapiens
  CDS (921)..(1247)
ctgtagtcggacacactcccagctggcccagtttgtgcatgaggtgaagaagagcccctttggcaaggatgttcggctggtctcccttggctcccggcaggtaaacagtagccagtatttccaccaggggccatcctgctcctttcgccacaactttgtcctgctcgtccaggccttgggagacgctgggtctgtgacaggctgaaccgtgtgaggagcagccccctccctgacctggccggcccagcactggaaggcaaaggagaggtggcggggcaggtccacatgtgttggtaggatgtcatttagctggcaccatctttttgcctctttctttctcctttgctgcagaacctttgtgtaaatgaagacgtgaaaagcctaggttctgtgcagcttatcaacgaccgctgcgtggacatgcagagaagcaggcacggtagccactgggaccgtggtgtagccgcaggtggtctggagagagtgaggcaggggtggcagtgactgaagaccattaagtgtctttcatagaaagaatggcagaggagaccccagttccttcctgagtcccctctccttgggaaaaagtgttcctactctctgggtcagtgtctggtccgaatccttggcttggagatgattttacgggctctttctggagaacagaagtaaaaccttacagtgttccgatgagaccacagtaggcagtacttgggagggtcttatagaccccaccccacggaagtgggtctcaacattacacaaccccctcttgggcccgtggacagttgctgtcctctctgttttctctctttgtgcctgtgccaccctcagagaagaagaaaggagctgaggaggagaagccaaagaggaggaggcaggagaagcaggcagcctgccccttctacaaccacgagcagatgggccttctccgggatgaggccctggcagaggtgaaggacatggagcagctgctggcccttgggaaggaggcccgggcctgtccctattacgggagccgccttgccatccctgcagcccagctggtggtgctgccctatcagatgctgctgcatgcggccactcggcaggccgcgggcatccggctgcaggaccaggtggtgatcatcgacgaggcacacaacctgatcgacaccatcacgggcatgcacagcgtggaggtcagcggctcccagctctgccaggcccattcccagctgctgcagtacgtggagcgatacggcgtttgaaggccaagaacctgatgtacctgaagcagatcctgtatttgctggagaaattcgtggctgtgctagggggtgagagcctcgtccccctgctgaccccgggcctgcaaaactcgctgggctgctttttccttggatgcccatcaggacacctcagttctctgtgtttttaagaagggtcggctgggtgcggtggctcacgcctgtaatcccagcacttgggaggccgaggcaggtggttcacctgaggtcaggagttttaagaccagcctggccaacatggtgaaatcccatctctactaaaaatacaaaaaaattagctgggagtgttgccgtggcctgtagtcccagctgctccagaggctgagacaagagaattgcttgctcaaacccgggaggcggaggttgcagtgagccgagattgtgccactgcagtccagtctgggcgacagagtgagaatcagtctcaaaaaaaaaaaaaaaaaaaaaaggccacagcatcgagtcggccttgttggcctactgggtttgccaatacctcagaaacaaatacctcggacaaatctttctctaaagacctcagtcagatactagtcaatatcaaatcatgtagatggcggcattttaggcctcggacaccatccctacatgacagtgacaatgatgaactctcctgtagaaaattatataggagtataaaccgaacaggaacagcacaacctgggacccagacatgcagtacctctacgcaaagtaaaagtagcagtggttcagcacactttgcatttacagccgaacaataccagcaacatcaacagcaactggcactcatgcagaaacagcagcttgcacaaattcaacaacagcaagcaaatagtaattcctccaccaacacatcacagggttttgtttctaagactttggattctgctagtgcacagtttgctgcttctgctttggtgacatcagaacaactgatgggattcaagatgaaggatgatgtggtgcttggaatcggggtgaatggcgtccttccagcctcaggagtatacaagggcttacacctcagtagtactacaccaacagcacttgtacatacaagtccatcaacggcaggttcagctttgttacagccttcaaatattacacagacttcaagttcccacagtgcactgagtcatcaagtaactgctgccaattctgcaacaactcaggttctgattgggaacaacattcgattaactgtaccttcatcagttgccactgtaaactctattgccccaataaatgcacgacatatacctaggactttaagtgctgttccatcatctgccttaaagctggccgctgcagcaaactgtcaagtttccaaggtcccatcttcatcctctgtagattcagttccaagggaaaatcatgaatcagaaaagccagcactgaacaacatagcagacaacacagtagcgatggaggtgacgtagcttcctccgagtggaactgcagcctggggacttgattaggtgctatgcatcagtagcattttgaatgcaagggatgatggaaagcagcacatgcgtttctgtggcagctgtggggacttgacagcaatgctcatctctcatgcttcaatttttcttttcttactgttaataggaaaaaaaatcaacatctgtaaattaagaatacagcagatgaagtgtcatcacatcatgtgcatggtgcggaacctgctgttttatctatttattgtgccgtgtttacagttttttgtacactgtaccttcattggttcctgtgctgtagtaaatgtgttaggtagctgtggactccttggtattttgtaaatggtataacataacttggttcccctctgggtccttgagttttctgtgtatcatgtgaaaaaaaatggtgacatacatacagaattttac

SEQ ID NO: 18442 - protein, 109 aa, Homo sapiens
MGLLRDEALAEVKDMEQLLALGKEARACPYYGSRLAIPAAQLVVLPYQMLLHAATRQAAGIRLQDQVVIIDEAHNLIDTITGMHSVEVSGSQLCQAHSQLLQYVERYGV

SEQ ID NO: 18443 - DNA, 2811 bp, Homo sapiens
acaaggcaggatgtgtgcgtgggaggaagattgacagtgactgagcctggacgggggagaccaggtatgaggtctgaagcacctggaacagaaaggacaggacagatgtgggcacactgcacgtgtagaatcaaaggactgacagcaggtcgaatgtgaggaatgagggagggaaagaatcaggactcaagtgccatcctggctgcctcaaaaaatgatactgtcttccagagggaaaggaaagataacaatagttactgctttgtggcgtacatgtgatgaatttcattttggacattccagtaggatatccaagtggaaatgcccagtaagccttagacataaggatctggatctcaagagaaaaattgaggttgaaccataatatgtctttcccctcgaatcatgtaggtttctcttttgccttctttcattggcctaagtggtcctaaatgctactgctgatgctgtcttagtttgcgactgttgtttgcaccccaccttttcccaaaggtaatctgtagacttgcatggattgggttaaggtggttaacctgcagctttgctgttcaaagcttggcttcccactaccagtttgccaacttaatgagtacttcaacttgagtcaaattagtattgttccaaatatcctaatagtatcctctatgtgtgactctaggtcttacaaaatcaaggtgtcctttctcattgagacttccttattaataaaatatttcttctattaaattcaacctggcaccaagcatagtaggtaataggcacacacaatgactgtttattgaatgaatgaataaaatgattatgttagggcattctgagcaattcatcctaagcagctaattttctcctacttcttttattatagtgtgtgtttgtgtgtgtgtgtgtgtgtgtctgaaatgtcccatcctacaggttcattaatatttaatagaaatgaaagaagaaaaatacctattaagtgttttgatttcatccttttcattgaattgaaaaagtatatcatttattcctgaagagaaatctagattttgctctatattaaacatttgacatttattggtccttaatgctaatatagataccagcctgctggttgtcacattctatctgtttatacgaaggttgtagacacacagcgtatgtacatatgcctagttgctctcattccttttgtttcacatctcaagcctaacccagactgaaaaggttttgaaggctgagattattcatcaccccatcattatagaaagcagggctggcccaaggttctcacagtgggagcaaggtggattttaactctgatcagtgttgtagctcaaatataaaaagaactgcagcacaaaagtcacaaggataaatgatcccctcgttcttctcccataaaaataagcagccaattgaaggtggaagtcagtacagtgcggcattcccagaggcgacagaacctaagattccatttctaaagacactgctcaacaagaagaccacctgggatgtcttacataaaaccattggcctggcagcttttggctgagttctctattctggttcaagccagcatcacagcctatctgtggttttaacaactgatggaatttgtattttgagaaccctcatccgttagcatgaagcaaactcaaagcattgttgctcatcagttgtcatctgtttgagaaagattttgatttgtttacttgtagtgaagcttgaccatacttctccaggggctttttaaaaagatgaatgtgtcagcttgtagatttgtccccatgaatgaaaccacaagcaaattctcttctctcttccagcctcccttcctccctcttgtttcttcagtggccatctgtgcattatgttcccattgccaggccctcttcaagcagcttatctatgagtgaattcagaaacttcaaattataaaggacacccagataattggcctgttctccaaagtatctgtcccctgtgctgctgccagattccttcttaatgaatacatccagtgacagtgggattcttgagcttgtccgtatctgtgagaaaatgagctctcctgctttgtaacagcttgtggctcagggaaaaaaatgacagccattgcacaagtttcctttgaatgtagttttctttcccataaatgatactttgagaatacagttaaggggttattagttttctatttcatgcctggcctgtgtgtgagaataacacaagctgtcactgcaaatcagtagctaaaaatgctttgtctggttaatgtgaacatttaatatttggctcaattaaaaattaaccgatgaaagtacatgtcattggaatttgaaaataccttttgtacggaatacttaaagggcatcacccatgactaaaccagtgcttttaaaatatggagaatatggggaaatttaatatgagttgggatacttgactcttttttaaaacctctctacctgtttggcacaacagggtattgataaagagtgggctcattgttatggcaaaggattcacttgcatctctgtgtttttaagtgggtaattgtttttttgcactcagtcacatgattaaagcagacagaacaagagatcagttattcatttataccatacttttaaaaaaatattgagccaggccctggggaagtgggaagtgagagccagagcggcgtggctgatagtctagggcagtgctatccaatcttttggcttccctgggccacattggaagaagaagaattgtcttgggccacacgtaaaatacgctaacacgaatgatagctgatgagct

SEQ ID NO: 18444 - DNA, 2197 bp, Homo sapiens
  CDS (211)..(876)
agctgcagatgggacacagggcatcaagtccctagactgcacacagtgtgggaggccctgggcctggccaacaaaaccattgttttctcctgaccctttgggcctgtaatggttggggctgctgtgaagatctctcacatgcccttgagacattttctggggagaaattcaagctagctgcagaaattagcataagtaatgaggagctgaatgttaatccccaaaacaatggggaaaatgtctccagggcatgtcagaggtcttgacagcagcccttcccatcacaggcccagaggcctaggaggaaaagatgatttcatgggccaggccctgggctctcctgctctgtgcagactgcagacttggtatcctgcattccagaagctccagccatgcctaaaagaagccaaggtacagcttgggttttggcttcaaagggtggaagtccaaggtattggcagcttccatggggtgttgagcctgcaagggcacagaagtcaactattgaggttggggaacctccacctagatttcaaaagatgtatggaaatgccggatgaccaggcagaagtttgctgcattgggggcccctcatggagaacctctgctagggcagtgtggaagggaaatgtggggttggagcccccacacagagtccctactgtagcactgcctagtggagctgtgagaagagggccactgtcctccagacccctgaatggtagatccactgacagcttgcattgtgcacctgaaaaagctgcagacactcaatgccaacccatgagagcagctgggagggaggctataccctgcaaaaccacaggagcagactgcccaagactatgtgaacctgcctcttgcatcagtttgacctgaatgtaagacatggagtcaaaggtgatcattttggagctttaagagttgactgtcctgctggatttcatacttgcatgggccctgtaatccctttgttttggccaatgtctcccatttggaatggctgcatttaggcaatgtctctgtacctgcattgtatctaggaagtaactaattttctttttattttacagactcataggcagaagggacttgtctcagatgagactttggactgtggactttttgaattaatgctgaaatgagctgagactttgggggactgttgggaaggcatgattggttttgaaatgtgaagatgtgagatttgggaggagccaggggcagaattatatgatctgactctgtgtccccacccaaatctcatcttgtagctcccataatttccacttgttgtgggagagacccagtgggagatgattgaattatgtgggtgggtctttcttgtgctattctcatgatacttaatgggtctcatgagatctgatggttttaaaaatgggagttaccctgcaaaagctctctgcctcctgccatccatataagatgtgacttgctcctccttgccttccaccatgattgtgaggcttcctcatccatgttgaactgtgagttctccattaaccctcttttgtaaattgccaagtttttggtatgtctttatcagcaatgtgaaaatggactaatacagtcaggcatgatgtttcatacctgcagtcccagctatgtgaaagctaaggtggaagatttgctcaaaacctggccaggcactgtggctcacgcctgtaatcccagcactttgggaggccaaggcgggtggatcacaaggtcaggagttcaagatcagtctggccaacatagagaaaccccatctctactgaaaatacaaaaaattagccaggtgtggtggtgtgtgcctgtaatcccagctactcgagaggctaaggcaggagaattgtgtgaactcaggaggtggaggttgcagtgagctgagatggagccattgcactttagcccaggtgacagtgcaacactccaaaaaaaaaaaaaaaacacctgaggttgaggctgcagtgagccatgatcatgtcactgcactccagactgagtgacagagtgagaccctgactcaaaaaaaaaaaaaaaaaaaaacacagcataaatacaattttacagtattcacccaactaaaaaaaaaaaaaaaaaaaaaaaaaaaaaacacctgaggttgaggctgcagtgagccatgatcatgtcactgcactccagactgagtgacagagtgagaccctgactc

SEQ ID NO: 18445 - protein, 222 aa, Homo sapiens
MLIPKTMGKMSPGHVRGLDSSPSHHRPRGLGGKDDFMGQALGSPALCRLQTWYPAFQKLQPCLKEAKVQLGFWLQRVEVQGIGSFHGVLSLQGHRSQLLRLGNLHLDFKRCMEMPDDQAEVCCIGGPSWRTSARAVWKGNVGLEPPHRVPTVALPSGAVRRGPLSSRPLNGRSTDSLHCAPEKAADTQCQPMRAAGREAIPCKTTGADCPRLCEPASCISLT

SEQ ID NO: 18446 - DNA, 1601 bp, Homo sapiens
agatgatgctgtttttaggagattgtttaaaagttcatgcttgttagtgtttggtacttaaagatacttttgaaaatggtttatttgccatctttttttgtgtgtgtgttgttttttgttttttggttttttgagatggagtctcgctctgttgcccaggctggatggagtgcagtggcgcgatctcggctcactacagcctctgcctccctggttcaagcagttctcctgcctcagcctccaaagtagctgggattacagtcatgtgccactgcacctgcctaattgggaaaacaagttttaaatgacatctcttttttccaccagatgttgctgtagcattacatttatctgctgtgttaaattgttactaatatgcaattatgtaaaataactttttaactgaaaatcttaagtgtagagatagcttactagctaatggttcaattgtaaattcagatgagccactgcgcctggcctatttgccatctttgagctaagctaaccgtacttaagagtttgttttcctttccaaagaaaggaatgtagagagtaatatgttggtaatatgatttatattagtgaagagtattatgaatggagtttctatttacttgttattaaacaagttcaaatgatttttttttttcttttagtgattagctttttcttactgcttcaaatttggtaaaagtgttctatgagatattattttatttattttttggagacggagtctcactctgtcacacaggctggagtgcagtggcacaatcttggctcactgcaacctccgcctcccaggttcaagcagttctgcctgccatagcttcctgaggtcaggagttcaagaccagcctagccaacatagtgaaactctgtctctactaaaaaatacaaaaattagctgggcgtggtggcgggcgcctgtaatcccagatactcgggaggctaaggcaggagaatcacttgaacccgggaggtgaaggttgcagagagccaagatcacaccactgcactccagcctgggtgaccgagcgagactccgtctcaaaaaaaaaaaaaaaaaagctttaaaaagctgaattttagaaatatttctagcagtgtcagtgagttcctcttttaatagtgttttaaagtataaatctggtaacatactgttcttgtagttttttgttagttttgtttttcaggttaattacccaaagcctcatccatcctcaaggtttttaaattttatttttttaaaataaattgtgcattgtatttgtgaatttttaaaatattactgttttatttaaatgccatgctgagcaattgttctctgtacatggtaaccaaaacttagagatttcgatcaattttgatcaatgtttagtaaaccaaaacatgtactgtgtacaacggaaataatatggcatattagccaggcatgatggttgcccaagacagttaaattaaattaagctcaattctgtattttattagggctctgttatgtccttcatctgaaatgtacacatttttggtgtatgcttggtactggagattcatatatgcaaatattctcatgcaagaagttccacagtaacaacagc

SEQ ID NO: 18447 - DNA, 2336 bp, Homo sapiens
  CDS (1775)..(2077)
atttttttttttcctctgtgctcttagtgctattattgtaagttcttagctggttccctctcaaccattatccttaaattgaatgtgttattgtcactatgttgtgtcctggtagggcatttttgacagtgaatgttgagaaagcatatgcatgtgacagggcggatttgttagaagcagtggaaaggtgagtactaaactgggtgtttaaaatgcaagcttcagctgggcacagtggctcacacctgtaatcccagcactttgggaggcagaggcgggtagatcacctgaggtcaggagttcaagaccagcctggccaacatggtgaaaccccctctctactaaaatacaaaaaaagtagctgggcatggtggtgcatgcctataatcccagctacttgagaggctgaggcaggagaatcgcttgaacccgggaggctgaagttgcagtgagccaagatcgtgccactacactccagcctgggggacagagcaagactctgtccccctcctgccccgccccccgcaaaaaaaaaggccaggtgtggtggctcatgcctgtaaggcaggtggattacgtgaggtcgggagtttgagaccagcctgatcaacatggtgataccccatctctactaaaaatacaaaattagccaggcgtgttggcatgcacctgtaatctcagctactcaggaggctgaggcaggagaatcacttgaaccagaggttgcagtgagcagagattgtgccactgcactccagcctgggtgaaagagtgagactccatctcaaaaatatatatatatgaataatttttccaatgtctggtgaaaatctgtcttgtgtgtcttttcgtgtgtgtgtgtgtgtgtgtgtgtgtgtgtgtctgtgttttaacctttaaacaacagggaatagtgtcattttggtatgtaactgatcatatataagtatatgttaataattcaccgaaaaccctatctctattaaaatacatctaaaggaaaaggtctacatttcaattagttctatatctctaatttggatctcttgctatcccagaggatataatttaaaataagatttcttgtttattctcggtaagaagtaattacagagcacctctaagctgagtattgcttcttaaattgaaggcactaaagataaagattgctaaatatttcgggaactagatttaactgtgtgacttgaactgaaaagcattctaattttccattcttttatgggtgctggggaagaactgctttgacatgaatgtataatagaattaaaatgtcggtcttaaattttggggagttgttctcagtttgctcttggaatttattattgtaatactgtcattagatagtttgttggaagcagctaatacgtgaaagtgaagcatcttaatatgcatctcttttctttctgacaatgaactgtcaaaaaagctttgagtttatctaacaaacacagctgaggctgggattttaactccactattaatatattctaattttaaactactgtaactgaaagggcatacagcactaattcaatccagacatgtttgagtgcgtttgatagtctcatccttgtaatagctgctgaaaaagatgtggtagagatttcagactggaccactgacgtctgggaattgacactagcacacagactgggtcaggcaaggtacaacctggtgccgccagctgttttgcatggaagaccttatctgtaaaactcatagagagtcaaacaagatgtgtgcctctgaatgaatgggatccttggaaaggagttttaaaataggttttaaaggttttctattttcccctccagaaccagcaggaactgttctggatcacagcaacacgagtctgctttctgcttcttggcagagccgttgcccctgtggtggcagttgtgtggtgggtgatagctgggagtgggaatcgactctactccagcatgagggagagattcttttccaacttccccagacccgtcccacattgctcgtgtattctgccactaacaagaatgaagacatcacattggccgggcgcggtggctcacgcctgtaatcccagcactttgggaggccaaggcgggtggatcacgaggtcaggagatcgagaccatcctggctaacacagggaaaccccgtctctactaaaaatgcaaaaaaaaattagccaggcgtggtggcaggcacctgtagtcccagctactcaggcggctgaggcaggagaatggcgtgaaccctggaagcggagcttgcagtgagccgagatggcaccactgcactccagcctgggcgacagagcgagactctatctt

SEQ ID NO: 18448 - protein, 101 aa, Homo sapiens [sequence omitted]

SEQ ID NO: 18449 - DNA, 1510 bp, Homo sapiens
  CDS (352)..(1506)
aagggactgatggcctggttggcgctgctgagaactgtcgggagcttcttgagaccgaggaccgaaatcccggctccaggcctcggggactgcggactgtggggaggctggccggagagagagggaaggacggggcctggcccccgggactccctgtgccttgcttggagctgacgccgacggtttattgcagggaactgacaagatcacattttgagaagaagttggaaagaatcccaagtggatgaactgaatatctggatgaggacaagatctgtggggagagactgtaagatagaatgagtccatttaagtcccaggacggtggaaactagctagtagattgcagccatgttgtggaagctgctgctgagatcccagtcctgcaggctgtgttctttcagaaagatgcgatcacctccaaaatacagacctttcttagcatgcttcacctatacaactgataaacagtcgagcaaagaaaatacaagaacagtggaaaagctctataaatgttcagttgacattaggaaaattcgtagattaaaaggatgggtacttttagaggatgaaacctatgttgaagaaattgcgaatattttacaagaactaggtgccgatgagactgctgtagccagtattttggaacgctgcccggaagcaattgtctgtagtccaaccgctgttaacacccagagaaaactctggcagttggtctgcaaaaatgaggaagagttaatcaagttaatagagcagtttccagaatctttctttactattaaagaccaagagaaccagaagctgaatgttcagttctttcaagagttgggactaaaaaatgtggtcattagcagacttttgacagctgcacctaatgtttttcataatcctgttgagaagaataagcaaatggtaagaattctccaagagagttatctagatgtaggtggctctgaggccaacatgaaagtttggctactaaaattgttaagccaaaacccatttattttgttaaattctcccacagctataaaggaaacactagaatttctccaggggcaaggtttcaccagctttgaaattctccagcttctatccaaactcaaaggatttctttttcaactttgcccaagaagtatacagaatagtatttccttctctaaaaatgcttttaaatgcacagatcatgacctgaagcaattagttttgaaatgtcctgcccttttatattattctgttccagttttagaagagagaatgcaaggattattgagagaaggaatttccatagctcagataagagagacgccaatggttcttgaattaacaccacagatagtacagtacaggataaggaaactgaattcctcaggctacagaataaaggatggacatctagcaaatctaaatggatcaaaaaaagagtttgaagctaattttggcaaaattcaggccaaaaaagtaaggccattatttaaccctgtggcaccattaaatgttgaagaatgac

SEQ ID NO: 18450 - protein, 385 aa, Homo sapiens
MLWKLLLRSQSCRLCSFRKMRSPPKYRPFLACFTYTTDKQSSKENTRTVEKLYKCSVDIRKIRRLKGWVLLEDETYVEEIANILQELGADETAVASILERCPEAIVCSPTAVNTQRKLWQLVCKNEEELIKLIEQFPESFFTIKDQENQKLNVQFFQELGLKNVVISRLLTAAPNVFHNPVEKNKQMVRILQESYLDVGGSEANMKVWLLKLLSQNPFILLNSPTAIKETLEFLQGQGFTSFEILQLLSKLKGFLFQLCPRSIQNSISFSKNAFKCTDHDLKQLVLKCPALLYYSVPVLEERMQGLLREGISIAQIRETPMVLELTPQIVQYRIRKLNSSGYRIKDGHLANLNGSKKEFEANFGKIQAKKVRPLFNPVAPLNVEE

SEQ ID NO: 18451 - DNA, 1449 bp, Homo sapiens
  CDS (118)..(459)
atagactaaaagcaaagacatggaaacagatatttaatgtaaatggaaaacaaaagagagcaggagtggcaatatttataacagacaaaatagatcttaagtaaaaaaactgtaaaaatggataaaaattgtcattatatagtgataaaggggtcaagtaatcaaaaggatatgacaactttatttcagacatttagagagaaggatgtaacaactgtaaatatatacacccccaacactggagctcctaaatatatgaagcaaatattaacagatctgaagagaaagacagattgcaatatgataatagcaggagaatttcaaaccctattttcaataatgaacagatcatccagacaaaaaatcaataaggaaacattggacttgaactacacattagaccatgggtgtccaatcttttggcttccttgggcaacattggaagaagaagaattgtcttgagccacatataaaatacactaacaatagctgataagctaaaagaaaaaaaaatctcataatgttttgagaaagtttacgaatttgtgttgggtcacattcaaagccatcctgggccgcatgtagcccatgggccatgggttggacaagcttgttttagaccaaatggacctgaatgacatatataggacaatatatccaaccccactaaaatacacattcctctcaagtatacacacagaacatattccagaatagatatgttaggccacaaaacaagtctttaaaaatgtagtccaggggcagtggctcatgcctgtaattccagcactctgggaggctgaggcgggctcctgacctcaagtgatctgcccgcgtcggcctcccggagtgctgggattacaggcgtgagccactgcacccagtcaaatattgctatatttctagcaaacagaatttagaagcataccaaaggatcattcaccattatctaagtgggatttatctctgggatgcaaaaatggttcaatatatgcaaatcaataactgttatatgaaagacaataattatatgatcatctcaatagatgaagaaaaaacataacaaaattcaataccttttcatgataaaaacgtttaacaaattaagtataaaaggaatgtacctcactacaataaaagccatcatactcaatgatgaaaagttgaaagcttttcctctatgaaaagaaacaagacaaggatatccacactttccacctctattcaaaacagtattagaagttctagccagagtaattagccaagaaaaagaaataaaaggcacgcaaaacagaaagaaaggagccagccacagtggctcctactgtaatcccagctactcaggaggctgaggcatgagagtcacttgaacctgggaggtgaaggttgcagtgagccaagatcatgccactgcattccagcctggatgacagagggagactctgtctc

SEQ ID NO: 18452 - protein, 114 aa, Homo sapiens [sequence omitted]

SEQ ID NO: 18453 - DNA, 2086 bp, Homo sapiens
cttgcacttaacattgttttgatttaattggtatttttaaataactagactcaaagatgaagtgtctgaaatgttgattatgtatcttcagtgggtcatcgccagagagcggtttcagcaagctgcagatctgattgatgctgagcaacgaatgaagaagtccatgtggggtcagttctggtctgcacaccagaggttcttcaaatacttatgcatagcatccaaagttaaaagggttgtgcaactagctcgagaggaaatcaagaatggaaaagtaagtagaagaactcattaagagattgtttgggggttatgttgtttagtctttgtgggtgctgaggttttctgcttgtaaaatctggttttcctaaaggatagtaaaacttctaaaaaatacatttcttaaaattataaaagcaatgcctgcttagagaatttagagagttcagaaaagtataacaaagtaaacatcactataattggtcatccatagctggtagcactggtaacatatggatgtgtattgcgttaaggttttttcttttcggtgaatatttatctacttaaagcataagatactataaactgtacaagggcaggggcttcactcatgcttactactgtctgtaatcctatctcctgcctaaatttttgacaaataacctgtctcaaatatgtagaagaaataagtaaaacaaatttgtgttttataataatgaggacattcttgtttgaaatctttgtttagctaaatgtttaaaatatgtcttggtaagaagccacaaacattattattcataattaacatgttttcttttttctccagtgtgttgtaattggtctgcagtctacaggagaagctagaacattagaagctttggaagagggcgggggagaattgaatgattttgtttcaactgccaagtaatgtttttgttcttttaatgtttttgtttctttttgagttcttccttaccttagttccaatgtgggcatttcctggagacaaaacttttgtttcacctgcatcatctttaagttttcttgatctgagttttctgcttttctgtaacagtgtatctattggaaaacaataacagaaatctcataatcctaaaatgttaagcattttgctaatattacacagagtatgtgaactaacagaagggctagactttgtttatcttgtacatcttggaaatctgtgacagcttggcttagattcagttttagtgtactgtatttgaaattaccgttatccacaggaacagtaactatagtttgtcctaatataacgaagtctactttataggttggctgagcatggtggctcacagctgtaatctcagcactttgggaggccaacatgggcacatcacttgaggtcagtagtttgagaccagcctggccaaaatggtgaaaccccatctcaactaaaaataaaaaaaattagttgggcatggtggcacacgtcctgtagtcccacctacctgggaggctgaggcaggagaatccattgaacccgtgaggtggaggttgcagtgagccaagatcgcaccactccactccactcccctctgggcggcagagtgagaccctgtctcaaaaaaaaaaataaaataaaataaagtctactttaaaagttgaaaataagcatgagatcttcagaaatagattttaaaatgttttaggcattgtttttagtttgcctaacctccacattcaaactctggtagtaaactgagcaaaataaacttgctgctctactattttgtgcctcgggatgcattcagatgctcctttcaaaagcaatacatggggctcacgcctgtaatccaggcactttgggaggctgagtctggtggatcacgagagctcaggagtttgagaccagcctggccaacacggtgaaacctcgtctctactaaaaatacaaaaactagccaggcgtggtggcgggcacctgtaatcccagctactggagaggctgaggcaggagaattgcttgaacccaggcggcggaggttgcagtgagctgagatggcaccattgcactccagcctgggtgacagagagactcggtctc

SEQ ID NO: 18454 - DNA, 4153 bp, Homo sapiens
  CDS (380)..(685)
gacatgctagtgctcggcccacccttctgtttttgtagccaaggcttgattggattttctgtatgtataatgggctgtttcaaaatggtcttgcctcattgtttcttcatatcttattgaaaccaacccactgttgatctcaatctgtgtaaggagaatgcggagtatggcattcgcaggactgaatccctagattttaagtttggaaggagatccaaccgggcagatgaattgaccggtggtgaatattctgtagcattttcctccctggagaggaatgccgccaccgctgggaaccgtggactggcatgtgagccagtggctgtgaaaggcgctgtgccctgtgtcctccgtgtactttagagcaggagcgtcacacatggtggagccgggtgatatcccgggcaggctcccgaaagctcctggtggcccatcaggggctggtttttccacctttttttttttttttttttcctcgagacaaggtctcactctgtcacccaggcaggagtgcagtggcatgatcttgactcactgcaacctttgcctcctgggttcaagcaattctcgttccttagcctcccgagtagctggcattacaggcactcgtcaccatgcccggctcgttttttttttttgtatttttagtagagacagggtttcaccatgttggccaggctggtcttgaactcctgaccccaaaatgatctgcccgcctcagcctcccaaagtgctgggattacaggtgtgagccaccacgctggccctcctcagcttttttttttttttaaataaccattattattccatattttttctatgaaatcatttataaacataaaatatcttaagtctgtaattcagtttatgatacatattcagttatgatacattctttgcatttcactgtttcatgtttcagccaaatcccatccccccaacctttttttttttttttttgagccagggactctctgtcgcccagactgtagtacagtggcatgatctcggctcaccgcagcctcttcctattaaagtactgggattataggtgtgagccaccgtgtctggcccctatccctctattaagtgcctttcagcaattctgtttttagaggaaaattcctttttgcttctgcttgctccttttaccacccctgcccatgaaagggggagttacctgtccagagcaagtatagctttggccgtgatcttcaaggactattgcattggtgctgactgctggggccccttggcccccaggttcccaccagtggagcaaacacgaagggtgcagcctagtcggaagtgttcccaaggacaacatcagtgtgcagacttccaggggaggggcatatgaaactgagccaacagaggccaagatgagaaccctcctgtgacatggtcccacccattaggccattcccttggtcagctggatggcaaatactagtagtgtatgctatggagcagacatttattaagtccctgctgtgtgtcaaggattgagctaggactctgcaggaaatgcatgtgtagttcagtcctggaagctgcccagcttccgcctcctggaagcatccttttctccccagctgctctcgcctgcacatcttacattctctggctggtccttctaggtgtgttcagccactttgagctgtgcctgcctgatctgcacactttgcaaatgtgtagactcagaaagagaaacagcccaaacagtggccagaaactgttcttggaggctctaggttgacaaaagggtcctttaatagctccaggttgacccctcccctagacacctgtgctccccctgagccacaccgtgacttcggaagttcaactgtcatccagtttggtcggctctttcacaaaataatttcactgattctgtcaggcattttcattactttgatttaaagtttttgtgtcaacctctggtactttagaatctccagatgttgaaaaacaaaatcccattggtaatgtttgttttcctttacacttatgaaaaaagcaacttttattctcgcctaaaatttattgtcgagagcacgtcttttaaagtaaaaaaatgtttgcagcatgtcatacggctctgaaatactatgtaggtcgcagcttgttttgaggcataagtgacaaatatacttgtgagagatgttattcttaccctattaaagaaattagaacatggcttttgtgtctctgatactgattttatatcttcgcaaccgaatttgtgaatcccagctagagtaaaagacacacgtgatgcatgaagaaagtgaaatggttctgtttggtatttatctcatcttgatctttggcttggaagaactgataatgaaactctctttgggaggacagagagctctggggcattcatctcccaactaggtctccgaatttggtgcagttcttgaaggcaggtgggtttacacagtggtgagaagtgggaagtatgaagggtgtgatcttcgccctctttttgtatgcccgttaacaaaactcaattgttaggcgttgagtagggctattgatttctagccaacggaaacacttactgtgtaatttccaggagagagacattttcaggtgatgtggactcattccctgcagttcagaaggtaatgagcaatagtgatcaatcctgaggttatccggggtgatttcagcttgtccattgcattgattgataaatggcatgctctgaggctgattgagtgatgaccagcagcatcaaagaaaaccctcagtttgcatggcgggtattagaagtggctgccttgatgcctcctgtcatcgtttgagtggtaaagagacattctttgtatgtttataactcttgatttggggtcatggttatcatctgtactaactgcacaggtcatcccgctcccatccctttttcattctttagaatcccccacagcggtccacgccccttgccaacttccttccactatcctggttctgttgttactcctgccgactgcagtgctgttccgtgagcttcttgaatgacatcgtacagtatctccgacgcacagtacgtaccagttacagttgtcttgacaggatctcctgtgatcttttgtcccttttcagtttagctcttggtggctccataggctctcaagcatcctggacagttctctgtgggctggcgtcctgggtcagattccagggccggatgtgagctgtgccttgaccatttgaagagctcaccgaaggaggtgggaatggacggtgcaggaaagtaactcaggcacccgaggctgctgagcccagagaagaagcacctgtccttggagtattgttccaggaaatggggaggcaaccggttccagagggcagaactgggttgggagacaaggaagcacagttcttgtaaatcaagaaaatttgtaaagccacataagctgtccaccagtgagagagagcatgtacatgctgtgagctgcagtcaggccgcctggccacaaggcatgttgtggcatgctgtgggagtcggcgttgaagcatcccagagacctcttgtgcttaaacaaagctgagttattcagcacactcctagatgtggggtctgattgttggtcaaactgaaggactcgagaaaatgaggactaagtggggggatgagagacatgtgagtgggtgttgggccagtagaatgacaaaaggagcaggcccaggctctttggaagacagacctttgcccttcagggggactgggggagtgtttcctggcaggtgtggacattcgtcctcatggatgtcttctttataataacctgtggaggacggcccagcgcatcatgccactgaccttcactgatgcttctgtacttaagaagtaatgtcccttggctgggcgcggtggctcatgcttgtaatcccagcactttgggagctggaggtgggcgaatcacctgaggtcaggagttcaagaccagcctgggcaacatggcgaaaccccgtctctactaaaaatacaaaaattaaccgggcatggtggcaggctataatcccaggtactcgggaggctgaggcgggagactcgcttgaacccaggagttggaagttgcagggagctgagatcacaccactgcactctagcctgggtgacagaacgagactctgtctc

SEQ ID NO: 18455 - protein, 102 aa, Homo sapiens
MVEPGDIPGRLPKAPGGPSGAGFSTFFFFFFSSRQGLTLSPRQECSGMILTHCNLCLLGSSNSRSLASRVAGITGTRHHARLVFFFCIFSRDRVSPCWPGWS

SEQ ID NO: 18456 - DNA, 4869 bp, Homo sapiens
  CDS (150)..(4082)
aatgatttcctcagtgattacgtacagagcgagtccctgcgggttaggggccccctctggagccatcctgatggctttgggggccttgcttccattttccattattatgtggactaccggagcgacagcgcagtccaagaccttgcaggatgtctcgccgcaagcaagcgaaaccgagatccctcaaagaccccaactgtaaacttgaagacaagactgaagatggagaggcactagattgtaagaagaggccggaagacggggaggagttggaagacgaagctgtgcacagctgtgacagctgcctccaggtgtttgaatcgctgagcgatatcacagaacacaagattaatcaatgtcaactgacagatggagtggatgttgaagatgatccgacttgctcttggccagcttcctcaccttctagcaaggatcagacttcccctagccatggagaaggttgcgattttggagaggaagaaggtggccctgggcttccatacccgtgtcaattctgtgacaagtcgtttagccgcctcagctacctaaagcaccatgagcagagtcacagtgacaaactgcctttcaaatgcacctactgcagtaggctgttcaaacacaagcgcagccgagatcgccacataaaactccacaccggggacaagaagtaccactgcagtgaatgtgatgctgcgttttccagaagtgatcacttgaagatccacttaaagactcacacgtccaacaagccatataaatgtgccatttgtcgccgtgggtttctgtcctctagttccttacacggacacatgcaggttcatgagaggaacaaggacggctctcagtccggttccaggatggaggactggaagatgaaggacactcagaagtgcagtcagtgtgaggaaggctttgacttcccggaagacctccaaaaacacattgcagagtgccaccccgaatgctccccaaatgaggaccgagcggccctccagtgtgtctactgccacgagctcttcgtagaggagacctccctcatgaaccacatggagcaggtgcatagcggggagaagaagaactcatgcagcatttgttctgagagtttccacacagttgaggaactgtacagccacatggacagtcaccagcaaccggagtcatgcaatcacagcaacagcccttccctggtcacggtgggctatacctccgtgtccagtacgactccagattccaacctctcagtggacagctcaaccatggtggaagctgccccgccaatcccaaagagtcgagggaggaagagggccgctcaacaaacccctgacatgactggtccctcgagtaaacaagcaaaagttacctacagctgtatttactgcaacaaacaattattttcaagtcttgcagttctgcagattcacctgaaaactatgcacttagataagccagaacaggcccatatttgtcagtattgcttggaggtcctgccctcactctataacctaaatgaacatcttaagcaagtgcatgaagctcaggacccaggtctgattgtttctgccatgcctgccattgtctaccagtgtaacttctgttccgaagttgtcaacgacctcaacactcttcaggaacacatccgatgttctcatggatttgcaaaccctgcagctaaagatagtaatgcattcttttgtccccattgctatatggggtttctcactgactcttccctggaagagcatattagacaggttcattgtgacctcagtggctcccgatttgggtctccagtgcttgggactcccaaagaaccagtagtagaagtctattcttgttcctattgtacaaattcgccaatattcaacagcgttcttaaactgaacaagcatatcaaagagaatcataaaaacattcccttggccctgaattatatccacaatgggaagaaatccagggccttaagccccctatctcctgtggccatagagcagacatctcttaagatgatgcaggcagtaggaggtgcacctgcacgccccactggagaatatatctgtaatcaatgtggtgctaagtacacatccctagacagctttcagactcacctaaaaactcatctcgacactgtgcttccaaaattgacctgtcctcagtgcaacaaggaattccccaaccaagaatccttgctgaagcatgttaccattcactttatgatcacttcaacgtattacatctgtgagagttgtgacaagcaattcacatcagtggatgaccttcagaaacacctgctggacatgcacacctttgtcttctttcgctgcaccctctgccaggaagtttttgactcaaaagtctccattcagctccacttggctgtgaagcacagtaacgaaaagaaagtctataggtgcacatcttgcaactgggacttccgcaacgaaactgacttgcagctccatgtgaaacacaaccacctggaaaaccaagggaaagtgcataagtgcattttctgcggtgagtcctttggcaccgaggtggagctgcaatgccacatcaccactcacagtaagaagtacaactgcaagttctgtagcaaagccttccatgcgatcattttgttagaaaaacacttgcgagaaaaacactgtgtattcgaaaccaagacacccaactgtggaacaaatggagcttccgagcaagtgcagaaagaggaagtggagctgcagactttgctgaccaacagccaggagtcccacaacagtcacgatgggagcgaagaagacgttgacacctctgagcctatgtacggctgcgacatttgtggggcagcctacactatggaaactttgctgcagaatcaccagctccgagaccacaacatcagacctggagaaagtgccatcgtgaaaaagaaagctgagctcattaaagggaattacaagtgcaacgtgtgctctcgaaccttcttctccgaaaatggcctccgggaacatatgcagacccacctaggccctgtcaaacactacatgtgccctatttgcggagagcggtttccctcccttttaactcttactgaacacaaagtcacgcatagtaagagtcttgatactggaaactgccggatttgcaagatgcctctccagagtgaagaggagtttttagagcattgccaaatgcaccctgacttgaggaattccctgacaggctttcgctgcgtggtgtgcatgcagacagtgacctccaccttggaactcaaaatccatgggacgttccacatgcaaaagacagggaatgggtctgcagttcagaccacagggcggggccagcacgtccaaaaactgtataagtgcgcatcttgcctcaaagaattccgttccaagcaagatctggtgaaacttgatatcaatggcctgccatatggtctgtgtgccggctgcgtgaatctcagtaagagcgccagcccaggcattaacgtccctcccggcacgaatagaccaggcttgggccagaatgagaatctgagtgccattgaggggaaaggcaaggtggggggactgaagacacgctgctctagctgcaacgttaagtttgagtctgaaagtgaactccagaaccacatccaaaccatccaccgagagctcgtgccagacagcaacagcacacagttgaaaacgccccaagtatcaccaatgcccagaatcagtccctcccagtcggatgagaagaagacctatcaatgcatcaagtgtcagatggttttctacaatgaatgggatattcaggttcatgttgcaaatcacatgattgatgaaggactgaaccatgaatgcaaactctgcagccagacctttgactctcctgccaaactccagtgccacctgatagagcacagcttcgaagggatgggaggcaccttcaagtgtccagtctgctttacagtatttgttcaagcaaacaagttgcagcagcatattttctctgcccatggacaagaagacaagatctatgactgtacacaatgtccacagaagtttttcttccaaacagagctgcagaatcatacaatgacccaacacagcagttagtgcaagtacagtctctcaaggagaattgattttgtggcacaaaaagggaacatgttttactctttgcacgaaactttcattgttaatgtatattattcagaaacattgtattgtaccataaaacttgtattatcaaactgttggatgttcatgtgtttgaacttttgcgcaccggatagaccccttgtatataaagtgttgcacatgtattatgtcgtctgatactaaaatggtcttataaagacaagtggacttgggccctattcaggcaagattaaaaaaaaaaaagactatgaccaaaatggcttaagataaagtatttttaaggaagaaagattaaaaacaactgttatacatgagactatggttggacttccttttctttacacttaagcctagaatttctctttaggtatatcagcgcttaaatccaagactattttttattgctgaagattcttgcaaaccatgaagagatgttctcacagaacagaaccccacagctggataaggcccgtatatatatatttgtaagccttgcaatgtgacaggtagcatcactatatatgcaatagttgttatgtagactgtcaaagaatttttttttccctggatacatttgaagctttgagtgttcaaggttttccttaatgatttcacgcagccaaattcttgaatcagttgaactaacctgtatgttactgttattaatgtttactctgcagtctgaacctggagattactggaattgttttccaagaggaaataaattcagtttaccatt

SEQ ID NO: 18457 - protein, 1311 aa, Homo sapiens
MSRRKQAKPRSLKDPNCKLEDKTEDGEALDCKKRPEDGEELEDEAVHSCDSCLQVFESLSDITEHKINQCQLTDGVDVEDDPTCSWPASSPSSKDQTSPSHGEGCDFGEEEGGPGLPYPCQFCDKSFSRLSYLKHHEQSHSDKLPFKCTYCSRLFKHKRSRDRHIKLHTGDKKYHCSECDAAFSRSDHLKIHLKTHTSNKPYKCAICRRGFLSSSSLHGHMQVHERNKDGSQSGSRMEDWKMKDTQKCSQCEEGFDFPEDLQKHIAECHPECSPNEDRAALQCVYCHELFVEETSLMNHMEQVHSGEKKNSCSICSESFHTVEELYSHMDSHQQPESCNHSNSPSLVTVGYTSVSSTTPDSNLSVDSSTMVEAAPPIPKSRGRKRAAQQTPDMTGPSSKQAKVTYSCIYCNKQLFSSLAVLQIHLKTMHLDKPEQAHICQYCLEVLPSLYNLNEHLKQVHEAQDPGLIVSAMPAIVYQCNFCSEVVNDLNTLQEHIRCSHGFANPAAKDSNAFFCPHCYMGFLTDSSLEEHIRQVHCDLSGSRFGSPVLGTPKEPVVEVYSCSYCTNSPIFNSVLKLNKHIKENHKNIPLALNYIHNGKKSRALSPLSPVAIEQTSLKMMQAVGGAPARPTGEYICNQCGAKYTSLDSFQTHLKTHLDTVLPKLTCPQCNKEFPNQESLLKHVTIHFMITSTYYICESCDKQFTSVDDLQKHLLDMHTFVFFRCTLCQEVFDSKVSIQLHLAVKHSNEKKVYRCTSCNWDFRNETDLQLHVKHNHLENQGKVHKCIFCGESFGTEVELQCHITTHSKKYNCKFCSKAFHAIILLEKHLREKHCVFETKTPNCGTNGASEQVQKEEVELQTLLTNSQESHNSHDGSEEDVDTSEPMYGCDICGAAYTMETLLQNHQLRDHNIRPGESAIVKKKAELIKGNYKCNVCSRTFFSENGLREHMQTHLGPVKHYMCPICGERFPSLLTLTEHKVTHSKSLDTGNCRICKMPLQSEEEFLEHCQMHPDLRNSLTGFRCVVCMQTVTSTLELKIHGTFHMQKTGNGSAVQTTGRGQHVQKLYKCASCLKEFRSKQDLVKLDINGLPYGLCAGCVNLSKSASPGINVPPGTNRPGLGQNENLSAIEGKGKVGGLKTRCSSCNVKFESESELQNHIQTIHRELVPDSNSTQLKTPQVSPMPRISPSQSDEKKTYQCIKCQMVFYNEWDIQVHVANHMIDEGLNHECKLCSQTFDSPAKLQCHLIEHSFEGMGGTFKCPVCFTVFVQANKLQQHIFSAHGQEDKIYDCTQCPQKFFFQTELQNHTMTQHSS

SEQ ID NO: 18458 - DNA, 3901 bp, Homo sapiens
  CDS (3544)..(3858)
aaattgcttattaagcctcaggtttcttcacttacaaaatgaggataataattgcacctggtccacagggtcatgacatggattcagtagaaagctcagcagtgtacctgacttaacagttgttcacactaagatctttaaactttacaatggtgaaaaggcaatatgcattccatagaactcatacaaccattttgttcttaactttcagtaaaatattcaataaatattcaataaactaattcaaaaaattactttattacaaaataggctttgtgttagaggattttgcccaactgcaagctaatggaagtgttctgagcacattcaaggtaggctaggctgagctgtgatgttcagtggattaggtattaaatgcatttttaacttacaataatttcaacttataatgaatttatcaggacttgatcccgccataagtcaaggagcatctgtacaccaactgttggttattatttttcatccccacaagacagatatagttctgcatttctcatgcagattctacaggcctttattctaattttttaatgtgccaattttatcatatttggtttcttcagtctttaatatattcatgtagatgtctgtgaattatagtctatctatgcttgtaggctttaaaatatatttagtcaatggtgggtagaaattttattttagcttaaaaaattaatcttataaaatgcctgctgacatttcatgtaagaattcttttactcaattcatgtttttctcttcttccctgtggagtatatttattgactgcagatggaagcacattgctaaggaatggaaagctgcaagatagaacatgcccttcacctgcgtggttgcatagaaaccagtcgtttgtccaaatcttaaagaactcaagtggaaagcatacttaaaaatgtaaaggttagaatcacaaactacagtttgaattgaaatgactgaaagattgtttcaagaatataagaattctatctaaaaggagtgaatgaaaggtatattctggtaagtcctttataattatgattttgaacaaactgctttaaattatgctatagcatgaactgagaaggaaaaaagtgaatagaaggatatcaggattgctgaagcacagaacccagaacaacagtccaaaccaatgacggaggtgaaactaagatagcagccacaaccagaagttgattcagaaagaattaattcgggctgggttgtggtcatttatacctgtaatcccagcactttgggaggctaaggcagctggattgcctgagcctaggagtttgagaccagcctgagcaacatgacaaaaccctgattctaccaaaaataaaaaaaaaaactagcctgtggtggcaagcgcctctagtcccagctactggggaggctgaggtgggaggatggcttgagttcaggcaggggaggttgcagtgagctgaggtccttccactgaactccagtttgggggacagagcgagacactgtctcaagaaagaaagaaagaaagaattggctgggcatggtggctcacgcctgtaatcccagcactttgggaggccaatgcaggtggattgcttgaggacaggagttcaagaccagcctggccaacatggcgaaaccccatctctactaaaaatacaaaacttagctgggcatggtggcccgggcctgtaatcccagctacttgggaggctgagacaggcgaatcacttgaacccaggatgtggaggttgcagtgagcccagactgccactgcattccagcctgggagaaagaaaaaaagaaagaaagggagggagggaaggagtcaggaaggaaggaaggaagggattgattcagagacaaaacagaaatagaccttgtttttcgtgattaaaatatgctaaaagcaatagctaagattgcagctgaagagtatgaatataatagtagcccacaaaataccacagcattgtggttgttgctgtcgttggtcttagtctttgtctctatcttggttttggtatagatattattgtttgcaaggtactaaactagctcattataaatttcaggttaaaaaataagcagcaaggatatctggagacattctgacaataaatgcaatgatagagcactagccttttcactatagaccaatagaaatggaagcagtagttgtggggcatgaatatacagacacaagaatcagtggcacagaatagaatttccagaaacagataccaatgcacttatgcatttgttaatttagtatatgacaaagatcgctgctgtggtttgtatgtgtccctcagatttcatgtgttggcaacttaatccccaatgtgatagcattgaagggtgaggcctttaagaggagattggggctgggcacggtggctcacatttgtaataccagaactttgagaggctgaggcgggtggatcacttgaggtcaggagtttgatatcagcctggccaacatagagaaaccccgtctctactaaatatacaaaaattaactgggcatggtgaccacacctgtaatgccagctacttgggaggctgaggcaggagaatcgcttgggctgaggaggtggaggttgcagtgagctgagatcgccccactgcactccagtctgggtgacagaatgacactccatctcaaaaaaaaaaaaaaaaaaggacaggaagaatgatctgagctagcatagtcagcacattcagcccacttcctattgtgaagcccctgtagagaaccccccccaacccgcaagaaggctctcacctgctgtggcccctcaaccttggacttctagtttgaggtattctgttataagcaacagaaaacaaactaatataatggcatttcaaagtagtggaaaaaaacatgacattcagttaatggtttgaaggcaactggagagttattgaggtgaaatattattgaatcctctcttataatacatcaaaatatattccaagtagatcaaagtttacaagtaaaaataaaactgcaaaagtatgaaaagaagtcatgtaagaatttttacataaatcagattgaggaagaccttctatttttaacacaaaacccaggggtgaaacagtattaataaaaaattgatgacttcaacttcataaaaatttgtttaaagcttctaggtcaaaaatcataggcttcggtggaatattgctgtaaaagaaattttttaaaaacagaaaaaagaaagaaaaactacaggcaagttcaaaagataaaccacaaacctgagaaaaatatttgcgtctcctatcacagacaaaggacttatttcttgactatataaggaactcttaagcatcaataagaaatagattaacaacactataggaaagtagattaaaattttacatagaaaatataaaaataactaaacatcattgaaatataggaaagatttctcaatcactcaaaataaatgcaaattaaaactacactgagaagactttttaaaatctatgagactggcaaaaataataaaattataaaactgtcttggtgaaagtatggaattcaatttggcaatatctttggcatatatatatcttttgccccagaaattccacttccgggaatttatcctacagatactcttgtacatgcagaataacatatggactagattgtcattatggtattatctgttaaaaaaaaaaaaaggaccaaacaatctaaatataactggttacataaattatgatacagctttccagtggaataataagcttctattaaaaaaagagaatgggctgggtacaatggctcatgcctatgatcccagcactttggaaggctgggaggattgcttgagcccaggactttgagaagaccagcctgactaacatagggatatcctgtctctac

SEQ ID NO: 18459 - protein, 105 aa, Homo sapiens
MEFNLAISLAYIYLLPQKFHFREFILQILLYMQNNIWTRLSLWYYLLKKKKGPNNLNITGYINYDTAFQWNNKLLLKKENGLGTMAHAYDPSTLEGWEDCLSPGL

SEQ ID NO: 18460 - DNA, 2520 bp, Homo sapiens
  CDS (512)..(1744)
agcagtaggcgctggggccgcggcggaccctcgctgccctacctctctcgcgggttagtgcggggtcgggctcggccagtcctggccagctccgggagagcctggcccgaattcctgcctccaccctctttctcgccgcgaaggtgactgttccttttgccccagccctctcagacccgccccggattcccaggcatcgggagacgcggaaaggagtggggtctggtggaggccccgggcgtatcgctctccaggccgccctccgcgggcctgccccggccaccgctttaacgtcggagagaaggaattggggagaaaggtttaagagcctgcgacttcgttgctgaacttttcccccccaagacaggcttccgaaagctgcgccactggagggatccgggacctcagactactcgggtttggccctggcatgtgtgggagcagtttttattagagagaatgctcaatttgcaagttaatttcaagtctccagccacgtcaggaaaaaaacatgaaggaattaaaggaggccaggccgcgcaaagataacaggcgtccagatctggaaatctataagcctggcctttctcggctaaggaacaagcccaaaatcaaggaaccccctgggagtgaggaattcaaagatgaaattgttaatgaccgagattgctctgctgttgaaaatggtacacagcccgttaaagatgtctgcaaggaactgaacaaccaagagcagaatggtcctatagacccagaaaataatcggggacaagaatcctttcctaggactgctggacaagaggatcgtagtctaaaaattatcaaaagaacaaagaaacccgacctgcagatctatcagcctggacgacgtttgcagactgttagcaaagaatccgccagtcgggtggaggaggaagaagtcctcaaccaggtagaacaactgagagtagaggaagatgagtgtaggggaaatgttgcgaaggaggaagttgcgaataaaccagacagggccgagatagaaaagagcccaggtggtgggagagtaggggctgcaaaaggagaaaaaggaaagaggatgggaaaaggggagggggtgagggaaacccacgacgacccggcccgcgggaggccgggctccgcaaagcgctactcccgctcagacaaacgaaggaatcgctaccgcacgcgcagcaccagctcagctggcagcaacaacagcgctgagggagctggcctgacggataatggatgtcgccgccgccgacaggataggaccaaggagaggccacgactgaagcagcaagtgtctgtgtcctcaaccgattccttagacgaggacagaattgatgagcctgatggattaggacccaggagaagttcagaaaggaagagacatttagaaagaaactggtctggccgtggggagggtgagcagaaaaacagtgctaaagaatatcgaggcactcttcgtgtcactttcgatgcagaagccatgaacaaagagtctcccatggtgaggtcggccagggatgatatggatagaggaaagcctgacaaaggcttgagcagtgggggcaaaggctctgagaagcaggagtccaaaaacccgaaacaagaacttcggggtcgtggtcgtggcattctgattttgcctgcccataccaccctatctgtcaattcagcaggttctccagagtccgcgcctttgggacctcggcctcccaaagtgctgggattacaggtgtgagccaccgcgcccggccgaagatcacattctttaacaaggacctgtccaacatgccctgcccacttctccagactttcttacagaatcaatcatctagccatgccagtctacaatgtaccacttttgagaacatcatatatgttgttccctttgcttaagacacaccaggacgtgactccctctcctctccaaaaccaactgtttcttcaaccctcacttttcaactcaaaggtcttttcctctgagaggatatctctggtgctgcttctgtatatttccacagcatcctagccttccccagtcatggcacttcataattgtctgtgttacccatagagcaaggattatctctgccttgttcacagcttgtgcactgtgctttgtacataaaatgtgcccagtaggtttttgttgaatgaataaatgtatgggtccatgtgtgaggaagtcttcaccatccctcttacgctgtgtcaacctgttgatttataagatgggtttgatggctgagcacggtatctcacgcctgtagtcccagcactttgggagcccgaggtgggcagatcactaggtcaggagatcgagactatcctggctaacacggtgaaaccctgcctctactaaatatacaaaaaattagccaggcatggtggcgggtgcctgtggtcccagctgctcggaaggctgaagcaggggaatggcgtgaacccaggaggcagagcttgcagtgagccaagatcgcgccactgcactccagcctgggcaacaggctc

SEQ ID NO: 18461 - protein, 411 aa, Homo sapiens
MKELKEARPRKDNRRPDLEIYKPGLSRLRNKPKIKEPPGSEEFKDEIVNDRDCSAVENGTQPVKDVCKELNNQEQNGPIDPENNRGQESFPRTAGQEDRSLKIIKRTKKPDLQIYQPGRRLQTVSKESASRVEEEEVLNQVEQLRVEEDECRGNVAKEEVANKPDRAEIEKSPGGGRVGAAKGEKGKRMGKGEGVRETHDDPARGRPGSAKRYSRSDKRRNRYRTRSTSSAGSNNSAEGAGLTDNGCRRRRQDRTKERPRLKQQVSVSSTDSLDEDRIDEPDGLGPRRSSERKRHLERNWSGRGEGEQKNSAKEYRGTLRVTFDAEAMNKESPMVRSARDDMDRGKPDKGLSSGGKGSEKQESKNPKQELRGRGRGILILPAHTTLSVNSAGSPESAPLGPRPPKVLGLQV

SEQ ID NO: 18462 - DNA, 4077 bp, Homo sapiens
  CDS (1021)..(1323)
atgatgttttgtgtgtgttttaattctcatctatgacattggaataatgacaggacctacctcatagaattgtgaagattaaatgagatattataggtaaactaattagaacaatgtctgacacataataagtgcccttaagtgttaaatgagaatgatgttattgttttgtgttacagaattagtgtatctgtggaaaattggccaaaacaaattctgatggatcttctttattgctgtttaaatatttcagacaaaatgaaatataacctagaatatgaacagtgctagatatgcatacttgaaacaaaaatcatcatggtcatttatatatttctattttactaagatttttttctcttataaaaataaattataccttctaatagtaaggaaattgcctctgccagtttttgttgtttaatttgttttaatttcaaacattaaaatagcacattaattgatcaaggaatctcaattactttcaaatgctgcaaatatactaatatttattcatggcagtcacagcaggggtagagggacaggagacaaccatcttctagaggaagaacttttaaaacaattatattaattccatttataggaaaaagaataattcatagaaaaattaatgttgcagttcctaaaagcatgttccagttactattcccaaaacaatgtgtcagattctattgtattcattggctattagtcattttggcagcttgggctatgctgccactaacagtttcatgagactagcatactatcttctagtttacacaaaattgtgtagataccttgtctctctatcagactgttgctccttgaaggaaagcgttaaccaagcctgttctgtattccccatatccagtatggtactttgtccatagaaagcactcagtagattccaaagggatcatacaattttagagccacaggagaaaggccttcattagatatgggtaaattcattgtgtaatgtatgaaaaaaatatatactaactctacagtaaaggaatgaaaaaagtctggaaagatgcttttccccatgaagcctgctttccctttgctcctttgcagtttcccaatcttgttcctcttcctgtcactcatggtgctaacacagatgcctcaggacaccgcttggctgggtgcatctacaggtgttccctgcgtatccgaaatggccttattcagcagattctcttgcttgtgtacgtccctgtctctccctctaaaccggagccctgtgaaggcagaaatcattcttgtcttgtgttgcattatttttgtctagtgtgtagtggtccggtgtatatctaaaaaaaaaacactcatatatagtaatgattgaagtaagtgtctagctctgctgtgggctagctgtgtgatttgggggaagtccgttagcctctctgggcctctgtccatctctctataaagagatgaggctggacctgatcagtgtttgaaatgaggtgatccatttgctgattctgatccagaacggtgtttttatttttattttttcttgtttgtttttacagagaagcgtgtactcccattttgctgcaagaccccctttcaactttcacctttgtgttcagtgttatcctccgagctcctgaaggcactctggcataggctgaagctttgtgttacctttctgttctaaaatttggagtctgtggttttaagacatgcatgatttcgtgcttcacctccatttacttacaagcaggagctttcatttacattgtcttgtcgtcttgagtatcatttgttttgactctttctacctggcaaagcttttggatttcaaagctcacaaattcctgctgttggctgtgccctttactttaacaggggtgattatatcttctctctagatatttttattagcatcctacagggtgtgaatttttagcattatgttgaagataaaatgaatagtgggaaaacaacatctttcggaatatatatccacacatgaattttagaaatcctattactaatttgaaattatttattttcctttctatggattatacttatgagtctatgttggttatggagatggatgaatacattttgattctgaacttaccagcaaaattcataagtaagtatacatatgtactatagacatgttaataactttatttaattagttataccccaggatttttttttccagggcaaaaccaatataaaaatgggtataatcctcagtgaatctgttgtgtgaggtctgattacttctatgacgtggcattctataaatattgctgcttattagattgaagtatagttgacatggacccatatttagagtgggccataacatgcctttgttgagtaaaaatgttaatatagctagtagttatgaacagtgagatgaacttctgctatttttgcactcaaaaaaagtaagaaatgtaaattttgtgagtgtgttttctgtgctgagtagaatagcagccattacattgagagataggtgaccgtttggctgattattgctgcctattttagaacattctgtatggttagctacttgaagcatagattcacaataggagcaactttcaaatctagtagaaacccgtgggatatacacatgggcctgttcaaataattgaactcccttccacttatgactatcttatttgccacttggtgcagccctgaagattgtacaagctgtgaagaagccacttggatatggtctggcagtctcaaagcaatcatttcagcttccgtcacagtagacctactttatggagcaccaaggggcactgtcattaagaatactaaggaagtaattgcttgtacatggccctgagtagttccttcccttctatatagtttgcatgcttttacacagttattctccacgttgttatttcagatattaggagatttgtggtcacaggctaaagatgaccttattatacaacaatctgacgtttgaagcagcagtatctagatatgtcagtttcttatatatagctttgaataagtgtttctgctttggaagaagctctacctatctgatacatctgtaaatgtggcaagttaaagattaccatggtcaatacagtctttctccatctttggtcttattaccctcaccctatgtcaagtgctttatctcttttggagaagggagcctgagtttactgaggactcaatgtgcttgctatcaatgcctactcacttaaaagacatttattattacttcatagacaaaatttattgattaataaaatatctgaaatgaataaggggcattagagaagacagttctgattcaaatttatttttccccttattttctgtaaatatattttaccttattaaatgtgtgtgagtacataacaatgagaaagagaatgaatgagaaaatgtaggcacacactctctcagaataaaatcttgctcttgtgtatgattttgttctgatgccagctatctgggtttgaaaaaaaagtttttagtgccttgttaattatgtgttcaccattattacataagtaattaccttatgtaataatattaatgatattaagctccattcaataagagaactgtaatcctcaattgcacagacatcctcgcctttagatatttattcaaaatttagagaaaaagaaagatacatagaagaattagatatttgatctttgtaaggatttccaaaaaactttttgaccaatttcagccaacattagtgaaacataatcagtgatataacattgcatggtattaacattgtttcaggatcatgagaaagctctttctgtatcagaaatgcatacctttaaatggaatcccagcactttgggaggccgaggtgggcagatcacgaggtcaggagatggagaccacggtgaaaccccgtctctactaaaaatacagaaaattagctgggcgcagtggcgggcgcctgtagtcccagctactcgggaggctgaggcaggagaatggcctgaacccgggaggcggagcttgcagtgagcggagatcacgccacagcactccagcctgggcgacagagtgagactccgtctc

SEQ ID NO: 18463 - protein, 101 aa, Homo sapiens
MKKVWKDAFPHEACFPFAPLQFPNLVPLPVTHGANTDASGHRLAGCIYRCSLRIRNGLIQQILLLVYVPVSPSKPEPCEGRNHSCLVLHYFCLVCSGPVYI

SEQ ID NO: 18464 - DNA, 2483 bp, Homo sapiens
agtagccgtggcagcagccgcggcggctccgcgagctcgccgggtgggctcagttcagcgcacgccggagccgagcgcagggggcggggaagggacctgctgcagctgcagccgcctgggcgctcctggagcgcgcggtgactcccccggtcggcccgctccatgcagctccgttgcggaagtgtagcggggggaggcggcggccaccgcggcactaagcacgagaggccggggctcggccccctgcagcactaggctctgggagccgcgcgcggcgcgtcccagtggcccgactcgccgtgcgcccggcgcccaccgcagcctgcatgccccgcgctgcgccttgcccggcccccgccgcctcctgctcgcaccgctgcagccgggcgccggagtaatatgctcactcgagtgaaatctgccgtggccaatttcatgggcggcatcatggctggcagctcaggctccgagcacggcggcggcagctgcggaggctcggacctgcccctgcgtttcccctacgggcggccagagttcctggggctgtctcaggacgaggtggagtgcagcgccgaccacatcgcccgccccatcctcatcctcaaggagactcggcggctgccctgggccactggctacgcagagtgagtgcagcgacaccggcggcgcccctgctctcctcgcggcccttccccgcacggttccagccctcttctctccctgcttctcggcctcagggctctcactagctgccggcgtccaggcctcggcggggagctctttacttacactggccatttccctcttctccccactccctcttcccccagcccaaggacgcggcgtctccagccccggtatgggtggtggaggggtgggtggcagcgctggagcgtgggaaagctaaggtgagacaggtctgtgaatccggggtctctgtcacttggggaaaaaaaacgggcagaaaacctctgaagtttgaaacacataaggaaaatctgctatctgtacccccaccctcccaaaatatagttgacgccccgcgtgatgaagagtttatgggggtggaggcttggaggagatgtcactgcgcctgggagcttgtgtccgattccgggaggtggccgtgtccgagtgcgtggttgtacatttccgaaggtctcagtttctctcactttcagcccgcgagttcctccgcttctcctttagcaggtagtaaaatgctgcgctttcggtaagtgccagtactatttccctcagcccttggggagggggaaacttattccaactgtctaatataacattttggtaatccgctttggtgattaagcttgcgtttgactgatcagctatttcaggaaccgactgagttaggttgacgacccagagtggaatcgggaaaggagaggtggaggattttattgcccttcccccagctccatggccacttttccactgactattaataaccatcttatgaatggtaagataagtaacgttttcccttctatctactacctcagctgtacgaaacgggaaaactaggagacatttagaatagaattcaaggttattaatgaaccagggagtgcaaaagtgcacgcaaaacctggtggctggcacacctgcgccttttcctttaaccccatcccctcggtagttttggccctcccctatccgtgcacggcctcgctggttgattggctcgtccgggaaccaatcagctcttccaatgcctgggcgccttgatgctgaccctgttctggtggcccggataccccggggcaggcttggttcccgaccctaagggttccggtgggagagactgcttggaatctgctctgcttattatctctaattctcctttccttctcccatcatcctataaagcgtttctccatgggctgaaatggaaaacgtgtataaatggggctagacgattggagtgtgaaagtgaggaggcagaaatgcgctttgatgggagctcagacagtaaaaattaacacatcataaaagatgagcacggaagagaacgttgtgggtggcgaaggtacaaaatagcattgtaacttccaagagaaagccaaagcaaaaataaacacctgtgtaaggaaagacctaaaggagaaaaaagagcctgccaaacataccaaacactatttcttgactgaaataaaaacgttatttaaaagcccatttaggccgggcgcggtggttcacgcctgtaatcgcagcactttgggaggccgaggcgggcggatcacgtgaggtcaggagttcgagaccagcctgaataacatggagaaaccctgtctctactaaaaatacaaaaattagccgggcgtggtggcgcatgcctgtaatcccagctactcgggaggctgaggcgggagaatcgcttgaacccgggaggcagagatggcagtgagccaagatcgcgccattgcactccagcctgggcaacaagagcgaaactccttctc

SEQ ID NO: 18465 - DNA, 2362 bp, Homo sapiens
  CDS (40)..(2061)
agtgaattaccacccagtgccactcgatttaggctagatatgctgaaaaacaaagcaaagagatctttaacagagtctttagaaagtattttgtcccggggtaataaagccagaggcctgcaggaacactccatcagtgtggatctggatagctccctgtctagtacattaagtaacaccagcaaagagccatctgtgtgtgaaaaggaggccttgcccatctctgagagctcctttaagctcctcggctcctcggaggacctgtccagtgactcggagagtcatctcccagaagagccagctccgctgtcgccccagcaggccttcaggaggcgagcaaacaccctgagtcacttccccatcgaatgccaggaacctccacaacctgcccgggggtccccgggggtttcgcaaaggaaacttatgaggtatcactcagtgagcacagagacgcctcatgaacgaaaggactttgaatccaaagcaaaccatcttggtgattctggtgggactcctgtgaagacccggaggcattcctggaggcagcagatattcctccgagtagccaccccgcagaaggcgtgcgattcttccagcagatatgaagattattcagagctgggagagcttcccccacgatctcctttagaaccagtttgtgaagatgggccctttggccccccaccagaggaaaagaaaaggacatctcgtgagctccgagagctgtggcaaaaggctattcttcaacagatactgctgcttagaatggagaaggaaaatcagaagctccaagcctctgaaaatgatttgctgaacaagcgcctgaagctcgattatgaagaaattactccctgtcttaaagaagtaactacagtgtgggaaaagatgcttagcactccaggaagatcaaaaattaagtttgacatggaaaaaatgcactcggctgttgggcaaggtgtgccacgtcatcaccgaggtgaaatctggaaatttctagctgagcaattccaccttaaacaccagtttcccagcaaacagcagccaaaggatgtgccatacaaagaactcttaaagcagctgacttcccagcagcatgcgattcttattgaccttgggcgaacctttcctacacacccatacttctctgcccagcttggagcaggacagctatcgctttacaacattttgaaggcctactcacttctagaccaggaagtgggatattgccaaggtctcagctttgtagcaggcattttgcttcttcatatgagtgaggaagaggcgtttaaaatgctcaagtttctgatgtttgacatggggctgcggaaacagtatcggccagacatgattattttacagatccagatgtaccagctctcgaggttgcttcatgattaccacagagacctctacaatcacctggaggagcacgagatcggccccagcctctacgctgccccctggttcctcaccatgtttgcctcacagttcccgctgggattcgtagccagagtctttgatatgatttttcttcagggaacagaggtcatatttaaagtggctttaagtctgttgggaagccataagcccttgattctgcagcatgaaaacctagaaaccatagttgactttataaaaagcacgctacccaaccttggcttggtacagatggaaaagaccatcaatcaggtatttgaaatggacatcgctaaacagttacaagcttatgaagttgagtaccacgtccttcaagaagaacttatcgattcctctcctctcagtgacaaccaaagaatggataaattagagaaaaccaacagcagcttacgcaaacagaaccttgacctccttgaacagttgcaggtggcaaatggtaggatccaaagccttgaggccaccattgagaagctcctgagcagtgagagcaagctgaagcaggccatgcttaccttagaactggagcggtcggccctgctgcagacggtggaggagctgcggcggcggagcgcagagcccagcgaccgggagcctgagtgcacgcagcccgagcccacgggcgactgacagctctgcaggagagattgcaacaccatcccacactgtccaggccttaactgagagggacagaagatgctggaaggagagaaggaagcgggaagtgtgcttctcagggaggaaaccggcttgccagcaagtagattcttacgaactccaacttgcaattcagggggcatgtcccagtgttttttttgttgtttttagatactaaatcgtcccttctccagtcctgattactgtacacagtagctttagatggcgtggacgtgaataaatgcaacttatgttttcttgttggttcctt

SEQ ID NO: 18466 - protein, 674 aa, Homo sapiens
MLKNKAKRSLTESLESILSRGNKARGLQEHSISVDLDSSLSSTLSNTSKEPSVCEKEALPISESSFKLLGSSEDLSSDSESHLPEEPAPLSPQQAFRRRANTLSHFPIECQEPPQPARGSPGVSQRKLMRYHSVSTETPHERKDFESKANHLGDSGGTPVKTRRHSWRQQIFLRVATPQKACDSSSRYEDYSELGELPPRSPLEPVCEDGPFGPPPEEKKRTSRELRELWQKAILQQILLLRMEKENQKLQASENDLLNKRLKLDYEEITPCLKEVTTVWEKMLSTPGRSKIKFDMEKMHSAVGQGVPRHHRGEIWKFLAEQFHLKHQFPSKQQPKDVPYKELLKQLTSQQHAILIDLGRTFPTHPYFSAQLGAGQLSLYNILKAYSLLDQEVGYCQGLSFVAGILLLHMSEEEAFKMLKFLMFDMGLRKQYRPDMIILQIQMYQLSRLLHDYHRDLYNHLEEHEIGPSLYAAPWFLTMFASQFPLGFVARVFDMIFLQGTEVIFKVALSLLGSHKPLILQHENLETIVDFIKSTLPNLGLVQMEKTINQVFEMDIAKQLQAYEVEYHVLQEELIDSSPLSDNQRMDKLEKTNSSLRKQNLDLLEQLQVANGRIQSLEATIEKLLSSESKLKQAMLTLELERSALLQTVEELRRRSAEPSDREPECTQPEPTGD

SEQ ID NO: 18467 - DNA, 1595 bp, Homo sapiens
ggcctttttttttttttttttggatagagtttcactcttcttgcccaggctggagtgcaatggtgcaatcttggctcaccacaaccttcccctactgggttcaagcgattctcctgtttcagcctccccagtagctgggattaaaggcatgtgccaccacgcccggctaattttgtatttttagtagagatgaagtttctccatgttggtcaggctggtcttgaactcctgacttcaggtgatctgcccgcctcagcctcccaaagtgctgggattacaggcgtgagccaccgcgcccggccaagatcctgtatcaaaaagaaaaaaagaagtagcagacacagtgtagtccccgtggaccctgcactggcctcccttggtgtggtcactgttcttcactgtggtgttatgtgtcacagtcacagagccacattgggacactctgcagaccacactaactgaagactgtggctttcccatgcgtgccctttctgttctgggaccccatccagcaaccacactgcatttgtttggttttttgagagagggtctcgctctgttacccagagtgcactggtggaatctcagcttttaatatactttgggttttggaataattttaggtttacagaaaagttgaaggcgagtacagtggcttacgcctgtaatcccaacactttgggaggccaatgcgggaggattgcttgggcccaggagtttgagaccagcctgggcaatatagtgagacccccatctctataaaaaaatacaaaaattagccgagcatagtggcacatgcctgtagctccagctacttgaggggctgaggtaggaggatcacttgatcctggaagtacaaggctgcagtgagctgtgatcccgccactgcgctccagcctagtgacaaagcaagatcctgtatctatttatttacttattttgagacagtctcactctgttgcccaggctggagtgcagtggcaccatctcggctcactgcaagcttcgccttccgggttcacgccattctcctgcctcagcctcccgagtagctgggactacaggcgactgccaccacacccggctaattttttctatttttagtagagacggggtttcactgtgttagccaggatggtctcaatttcctgacctggtgatccacctgcctcggcctcccaaagtgctgggattacaggcgtgagccaccgcgcccggccaagatcctgtatcaaaaagaaaaaaagaagtagcagacacagtgtagtccccgtggaccctgcactggcctcccttggtgtggtcactgttcttcactgtggtgttatgtgtcacagtcacagagccacattgggacactctgcagaccacactaactgaagactgtggctttcccatgcgtgccctttctgttctgggaccccatccagcaaccacactgcatttgtttggttttttgagagagggtctcgctctgttacccagagtgcactggtggaatctcagcttttaatatactttgggttttggaataattttaggtttacagaaaagttgaaggcgtgagccaccgcgcccggccaagatcctgtatc

SEQ ID NO: 18468 - DNA, 2121 bp, Homo sapiens
  CDS (190)..(1491)
gatcgggtaggcggctctttgtcgaagctagaggaccggcaggcggcagcagcaactacggcggcggcggcagaacccagcagcgatgtggaggtggagacccacaggagccccggacttcacctgagctacctcagtggtcaccaagagtggcaagataaagaaaaccctgagttgggcgggaccaggatgcctgaccgggacagctatgccaacggtaccgggagcagcggtggaggccctggaggtggtggcagcgaggaggccagtggggcaggggtaggcagtggcggggccagctcagatgccatctgtagagacttcttgaggaatgtgtgcaagcgaggcaagcgttgccgatatcgccacccagacatgagcgaggtgtccaacttgggggtgagcaaaaacgagttcatcttctgccatgacttccagaacaaggagtgtagccgcccaaattgccgtttcatccatggctccaaggaggatgaggatggctataagaagacaggagagcttcccccacggctgaggcagaaagtagcagctggccttggcctttcaccggctgacctaccaaatggcaaggaggaggtccctatctgccgtgactttctcaagggtgactgtcagagaggagccaagtgcaagttccgtcacctgcaacgggattttgagtttgatgctcggggtggaggaggcactggtgggggctcaacaggctcagtcctcccaggacgacgtcatgatctctatgatatctatgaccttcctgacaggggctttgaggaccatgagccaggcccaaaacgccggcgaggtggatgctgcccccctgatggccctcattttgagtcatatgaatatagtttggctccaccgcgaggggtggagtgcagactgctagaggaggagaatgccatgctcaggaagcgggtagaggagttaaagaagcaggtcagcaacctgctggccaccaatgaggtactactggaacaaaatgctcagttccgcaatcaggccaaggtcataaccctgagctccactgcaccagcgactgagcagactctggcccccactgtgggcactgttgccacttttaaccatggcattgcccagactcacactactctcagcagccaggctctacagcctcgtccagtgtcccagcaagaactggtggcccctgctggagctccagctgctcccccaactaatgctgcacctcctgctgctccgccacccccacccccacacttgaccccagagatcacgccactgtcagctgccctggctcaaacaattgcccagggaatggcacctccacctgtctccatggctcctgtggctgtatctgtggctcctgtggcccctgtggctgtatcgatggcccaacccttggcaggaatcacaatgagccacaccaccactcccatggtgacttaccctatcgcttcccagagcatgcgcatcacggccatgccacactgatggggctaatggacactcccctggtatagcctcgcagggctggggtcagggggcccttgcccactcacctagccttccccatccctgtctgaagggctcccttgagaactaggacaagagactacaaggagtatgtcctgaggaggggttgggatggtgtgttttctctcacctcccttttatgagggtcctcttgtccatcttcaagcctcacagtgggggcttgcagaggagtgcagactgaagccagcagagaggaaggactgactgaggggctgtgtcctcttatgggaatttgggaacatccctcgtcttgtcctctcttctgcacagcacaggttccagcactggttttagaagaaaaaaataccctgcccagagggaaagccaggaaagattgggaagtgggtggtcaggagagaaggcctgataggagccttcagacaatttgggtcctagttgcttgggttggacaatacaggaattgcttctgggccctgggaaagctgggaccatagtgctccagcccaaagactaggggagcattcattaccctagtttgacctgaaaatccatagggcagggcccactactttccaaagaaataaaagaacaattatttttaac

SEQ ID NO: 18469 - protein, 434 aa, Homo sapiens
MPDRDSYANGTGSSGGGPGGGGSEEASGAGVGSGGASSDAICRDFLRNVCKRGKRCRYRHPDMSEVSNLGVSKNEFIFCHDFQNKECSRPNCRFIHGSKEDEDGYKKTGELPPRLRQKVAAGLGLSPADLPNGKEEVPICRDFLKGDCQRGAKCKFRHLQRDFEFDARGGGGTGGGSTGSVLPGRRHDLYDIYDLPDRGFEDHEPGPKRRRGGCCPPDGPHFESYEYSLAPPRGVECRLLEEENAMLRKRVEELKKQVSNLLATNEVLLEQNAQFRNQAKVITLSSTAPATEQTLAPTVGTVATFNHGIAQTHTTLSSQALQPRPVSQQELVAPAGAPAAPPTNAAPPAAPPPPPPHLTPEITPLSAALAQTIAQGMAPPPVSMAPVAVSVAPVAPVAVSMAQPLAGITMSHTTTPMVTYPIASQSMRITAMPH

SEQ ID NO: 18470 - DNA, 2885 bp, Homo sapiens
  CDS (751)..(1092)
tttttttttttttttttctggccagtcacgtgaagcagtgggagtggaaaaggaacaaagaaatctgtaactggtggtgatcagttactgtaaacaccacttcacctagaccagcctgagtatttttctttcgggtttttttttttttttttttttgctagttgcaaaatgaacatatttattataaaaaagttgaaacatatttgttttttgaggcaggctctcgctctgtcacccaggctgaagtgcagcggcgtgatcatgctattgcagcctcatctcctgggctcaagcaatcctccaacctctcaacctcccaagtcgctgggacctgacctcaggtgcatgccaccatgcccagctaattctttttacttttagtagagacaacttctcaccatgttgcccctagactggtatgaactcctgggctcaagcagttctcccaccctggcctcccaaagtgttgggattacaggtgtgacccaccatgcctggctgaaacttatgttttcttttctcttctttttttttttttttttttgagacggagtttcgccatgttggccaggctggtcttgaacccctggcttcaggtgatccgcccgtcttggcctcccacagtgctgggattacaggcgcaagccaccacagccagccatggaaagcattctgctgcttgtggaagaattttccctgcgtaaagttgtcgagatgtttgaataagtggtagagagagaggtcaggtgaatgtggcagatgaggcaaaacttcatagcccaattcattcaatttttgaagcattggttgtgtgacacaggtgttgtcgtggagaattgggctatttctgttgaccagtgctggctgcaggcattgcagttttcagtgcatctcattcatttgctgagcatacttgtcatatgtaatggttttgccgggattcggaaagctgtagtggctcagactggcagcagaccacctttttttggtgcaagtttggctttgggaagtgttttggagctgcttctcagtccagccactgaggtggttgtcgctagtttttgtataaaatctacttttcatcggatgtcatgatccagttgagaaatggtttgttgttgcctagaataagagaagacacttcagaaagacagtttttaaaattttcgctcagctcatggggcacccatttactgagctttttcacctttccagtttgcttcaaatgccaaacaaccgtagaatggttgacgttgagttctttggcaacttctcgtgtagttgtaagaggatcagcatcaatgattgctctcaattggttgttgtcaacttccgatggccggccactatgctcctcatcttcaaggctcttgtttcctttgtaaaacttcttgaaccaccactgcactgtatgcttgttaacagttcctgggccaaatgcgttgttgatgttgtgaattgtctctgctgctttacaacccattttgaacttgaataagaaaatcacttgaatttgctttttgtataacataattttcatcgtctaaaataaatataaaacaccaagtaataagtcattaacaaaaaaagtgacaaatgcacattaaaatgatatattgcgtaactacattcagaagaaaacaagaacttaaccacatttatttaagaatgtattccagtatcaaacggcaaatttcaacaacgcaaaaactgcaattacatttgcaacaacctaataaaagctgttacatttacttgattttagtccttaagagaaacttctgagagttaaatcctgtaatagagtcctcacatgaaggtgagagcaaagttgattcacctaatgtacgtgtcataattttaagtgttatgtggctgagttgaaggatgaaggtacaggatgtcttcatgttgataaaaattcaatgtctaatttcctttcatgtatgtgtgctttcttctttgaagctatagattagcctgactctgtcataggttaaattttctgagcatcttgtgttttccctaaactcgagtgactcctctgctatttatgcttgatttgatggcagggcaccccggctctgccccagactggcataccaacagaggctttggtgaaggggtccatttcgagaatgcccattgaagacagcagtcctgagaaaggcagagaggaagctgcatccagaggccatgttatttatgaaggcaaaagtggacatatcttgtcatatgatagtaagtattgtatgtatgcaccaaagccagtattacaatatgtgctaaaaacataggcttgggttttcccgcatttctgctctctgggagtcagtttatctttgctgagcctatgttttctctcagtaaatggggttagtaatacttgtctcatgagaattttgtgaataacagcttagtcgataaaaagtaattaacaacgcagagctcatattaaatgtcccataggtggtagctaagattgtcgactgtggtcagtcagtttagcttaggtaaagagcctttgttgaactttaatggaatacttttattttgaagagattcatgttttatgaattaagaattagagggtagataggctgggcgcggtggttcacgcctatctactatctaatcccagtactttgggaggccaaggcaggtggatcgcctggggtcgggagttcaagaccggcctgaccaacatggagaaaccccatctctactagaaatacaaagttagccaggcatggtggtgcatgcctgtaatcccagctactcgggaggctgaagcaggagaatcgcttgaatccgggaggcggaggttgctgtgagccgagatcgcgccatttccagcctgggcaacaagagggaaactccgtctc

SEQ ID NO: 18471 - protein, 114 aa, Homo sapiens [sequence omitted]

SEQ ID NO: 18472 - DNA, 2089 bp, Homo sapiens
  CDS (92)..(829)
atagataagtagtacatggtggataacttctacttttaggaggactactctcttctgacagtcctagactggtcttctacactaagacaccatgaaggagtatgtgctcctattattcctggctttgtgctctgccaaacccttctttagcccttcacacatcgcactgaagaatatgatgctgaaggatatggaagacacagatgatgatgatgatgatgatgatgatgatgatgatgatgatgatgatgatgaggacaactctctttttccaacaagagagccaagaagccatttttttccatttgatctgtttccaatgtgtccatttggatgtcagtgctattcacgagttgtacattgctcagatttaggtttgacctcagtcccaaccaacattccatttgatactcgaatgcttgatcttcaaaacaataaaattaaggaaatcaaagaaaatgattttaaaggactcacttcactttatggtctgatcctgaacaacaacaagctaacgaagattcacccaaaagcctttctaaccacaaagaagttgcgaaggctgtatctgtcccacaatcaactaagtgaaataccacttaatcttcccaaatcattagcagaactcagaattcatgaaaataaagttaagaaaatacaaaaggacacattcaaaggaatgaatgctttacacgttttggaaatgagtgcaaaccctcttgataataatgggatagagccaggggcatttgaaggggtgacggtgttccatatcagaattgcagaagcaaaactgacctcagttcctaaagataatcttccttcattctaattcaattgcaagagtgggagtaaatgacttctgtccaacagtgccaaagatgaagaaatctttatacagtgcaataagtttattcaacaacccggtgaaatactgggaaatgcaacctgcaacatttcgttgtgttttgagcagaatgagtgttcagcttgggaactttggaatgtaataattagtaattggtaatgtccatttaatataagattcaaaaatccctacatttggaatacttgaactctattaataatggtagtattatatatacaagcaaatatctattctcaagtggtaagtccactgacttattttatgacaagaaatttcaacggaattttgccaaactattgatacataagggttgagagaaacaagcatctattgcagtttctttttgcgtacaaatgatcttacataaatctcatgcttgaccattcctttcttcataacaaaaaagtaagatattcggtatttaacactttgttatcaagcatattttaaaaagaactgtactgtaaatggaatgcttgacttagcaaaatttgtgctctttcatttgctgttagaaaaacagaattaacaaagacagtaatgtgaagagtgcattacactattcttattctttagtaacttgggtagtactgtaatatttttaatcatcttaaagtatgatttgatataatcttattgaaattaccttatcatgtcttagagcccgtctttatgtttaaaactaatttcttaaaataaagccttcagtaaatgttcattaccaacttgataaatgctactcataagagctggtttggggctatagcatatgcttttttttttttaattattacctgatttaaaaatctctgtaaaaacgtgtagtgtttcataaaatctgtaactcgcattttaatgatcagctattataagcttttaatagcatgaaaattgttaggctatataacattgccacttcaactctaaggaatatttttgagatatccctttggaagaccttgcttggaagagcctggacactaacaattctacaccaaattgtctcttcaaatacgtatggactggataactctgagaaacacatctagtataactgaataagcagagcatcaaattaaacagacagaaaccgaaagctctatataaatgctcagagttctttatgtatttcttattggcattcaacatatgtaaaatcagaaaacagggaaattttcattaaaaatattggtttgaaat

SEQ ID NO: 18473 - protein, 246 aa, Homo sapiens
MKEYVLLLFLALCSAKPFFSPSHIALKNMMLKDMEDTDDDDDDDDDDDDDDDDDEDNSLFPTREPRSHFFPFDLFPMCPFGCQCYSRVVHCSDLGLTSVPTNIPFDTRMLDLQNNKIKEIKENDFKGLTSLYGLILNNNKLTKIHPKAFLTTKKLRRLYLSHNQLSEIPLNLPKSLAELRIHENKVKKIQKDTFKGMNALHVLEMSANPLDNNGIEPGAFEGVTVFHIRIAEAKLTSVPKDNLPSF

SEQ ID NO: 18474 - DNA, 3070 bp, Homo sapiens
  CDS (257)..(2647)
acttttttcatgttctccttgagtgaaggatgaggaaattgaaagcagagtatgcaccttttattaggagattcaaactgcatcctactggattagcctcaaaagtcctaaaatacaaagacatccatctgacagatcactgaggggaggacttgtttttctgttttagaatagtttccgattaaactttttagctcaagaagaaaagaagctagttatttctcacccaggagtggatttgtggtttggcttcaccatggcttcctgccgtgcctggaaccttagggtgctggtggctgtcgtgtgtggactactgactggcatcattttgggactgggcatctggaggattgtgatcaggatccaaagaggaaaatctacttcctcatcaagcacccctacagagttctgcaggaatggtggaacctgggaaaatggcagatgtatttgtacagaagagtggaaaggactgagatgtacaattgctaatttttgtgaaaatagtacctatatgggttttacttttgccagaatcccagtgggcagatatggaccatccttgcaaacatgtggcaaggatactccaaatgcgggcaatccaatggcagtccggttgtgcagtctctctctatatggagagatagaattacaaaaagtgacaataggaaattgcaatgaaaatctggaaaccctggaaaagcaggtagaggatgtcacagcaccacttaataacatttcttctgaagtccagattttaacatctgatgccaataaattaactgctgagaacatcactagtgctacgcgagtggttggacagatattcaacacttccagaaatgcttcacctgaggcaaagaaagttgccatagtaacagtgagtcaactcctagatgccagtgaagatgcttttcaaagagttgctgctactgctaatgatgatgcccttacaacgcttattgagcaaatggagacttattccttgtctttgggtaatcaatcagtggtggaacctaacatagcaatacagtcagcaaatttctcttcagaaaatgcggtggggccttcaaatgttcgcttctctgtgcagaaaggagctagcagttctctagtttctagttcaacatttatacatacaaatgtggatggccttaacccagatgcacagactgagcttcaggtcttgcttaatatgacgaaaaattacaccaagacatgcggctttgtagtttatcaaaatgacaagcttttccaatcaaaaacttttacagctaaatcggattttagtcaaaaaattatctcaagcaaaactgatgaaaatgagcaagatcagagtgcttctgttgacatggtctttagtccaaagtacaaccaaaaagaatttcaactctattcctatgcctgtgtctattggaatttgtcagcgaaggactgggacacatatggctgtcaaaaagacaagggcactgatggattcctgcgctgccgctgcaaccatactactaattttgctgtattaatgactttcaaaaaggattatcaatatcccaaatcacttgacatattatccaacgttggatgtgcactgtctgttactggtctggctctcacagttatatttcagattgtcaccaggaaagtcagaaaaacctcagtaacctgggttttggtcaatctgtgcatatcaatgttgattttcaacctcctctttgtgtttggaattgaaaactccaataagaacttgcagacaagtgatggtgacatcaataatattgactttgacaataatgacatacccaggacagacaccattaacatcccgaatcccatgtgcactgcgattgccgccttactgcactattttctgttagtgacatttacctggaacgcactcagcgctgcacagctctattaccttctaataaggaccatgaagcctcttcctcggcatttcattcttttcatctcattaattggatggggagtcccagctatagtagtggctataacagtgggagttatttattctcagaatggaaataatccacagtgggaattagactaccggcaagagaaaatctgctggctggcaattccagaacccaatggtgttataaaaagtccgctgttgtggtcattcatcgtacctgtaaccattatcctcatcagcaatgttgttatgtttattacaatctcgatcaaagtgctgtggaagaataaccagaacctgacaagcacaaaaaaagtttcatccatgaagaagattgttagcacattatctgttgcagttgtttttggaattacctggattctagcatacctgatgctagttaatgatgatagcatcaggatcgtcttcagctacatattctgccttttcaacactacacagggattgcaaatttttatcctgtacactgttagaacaaaagtcttccagagtgaagcttccaaagtgttgatgttgctatcgtctattgggagaaggaagtcattgccttcagtgacgcggccgaggctgcgtgtaaagatgtataatttcctcaggtcattgccaaccttacatgaacgctttaggctactggaaacctctccgagtactgaggaaatcacactctctgaaagtgacaatgcaaaggaaagcatctagacagtaaaacttacctgttgtggtctttttaatcacctcgtttgagttttatctgtttctctcctttatttcccagtcctctcagaaagtcttcctcaatgtattttgctcaggattaagaattagataaaacctgttgtttattattattcggcataatggacttggtagtttttctatttttcaatagatttgtacttgaataaggtgaagaatttcacacaacatacaagagtaccattgttccttatatcgttaaatctttgtgacacactttgacaaaaatgtagaacctataacaaattcttttacaagttactataaaggacacaaagagaaaactttaccttccagaacaaaatgactcctgatgaacagtgtgtggggatttgcttgtatgtattaaacttttgacctctg

SEQ ID NO: 18475 - protein, 797 aa, Homo sapiens
MASCRAWNLRVLVAVVCGLLTGIILGLGIWRIVIRIQRGKSTSSSSTPTEFCRNGGTWENGRCICTEEWKGLRCTIANFCENSTYMGFTFARIPVGRYGPSLQTCGKDTPNAGNPMAVRLCSLSLYGEIELQKVTIGNCNENLETLEKQVEDVTAPLNNISSEVQILTSDANKLTAENITSATRVVGQIFNTSRNASPEAKKVAIVTVSQLLDASEDAFQRVAATANDDALTTLIEQMETYSLSLGNQSVVEPNIAIQSANFSSENAVGPSNVRFSVQKGASSSLVSSSTFIHTNVDGLNPDAQTELQVLLNMTKNYTKTCGFVVYQNDKLFQSKTFTAKSDFSQKIISSKTDENEQDQSASVDMVFSPKYNQKEFQLYSYACVYWNLSAKDWDTYGCQKDKGTDGFLRCRCNHTTNFAVLMTFKKDYQYPKSLDILSNVGCALSVTGLALTVIFQIVTRKVRKTSVTWVLVNLCISMLIFNLLFVFGIENSNKNLQTSDGDINNIDFDNNDIPRTDTINIPNPMCTAIAALLHYFLLVTFTWNALSAAQLYYLLIRTMKPLPRHFILFISLIGWGVPAIVVAITVGVIYSQNGNNPQWELDYRQEKICWLAIPEPNGVIKSPLLWSFIVPVTIILISNVVMFITISIKVLWKNNQNLTSTKKVSSMKKIVSTLSVAVVFGITWILAYLMLVNDDSIRIVFSYIFCLFNTTQGLQIFILYTVRTKVFQSEASKVLMLLSSIGRRKSLPSVTRPRLRVKMYNFLRSLPTLHERFRLLETSPSTEEITLSESDNAKESI

SEQ ID NO: 18476 - DNA, 3333 bp, Homo sapiens
  CDS (112)..(2025)
cggcgccagcggccgcacgccgcggagcaggggctcggaggtcccgggattacggtgctcgagcacgctggtgggaaaggacccgggacttgaacagtgttgtgcggcgccatgcaggtctccagcctcaatgaggtgaagatttacagcctcagctgcggcaagtcccttcctgagtggctttctgataggaagaagagagcgctacagaagaaagatgtagatgtccgtaggagaattgaacttattcaggactttgaaatgcctactgtgtgtaccactattaaggtgtcaaaagatggacagtacattttagcaactggaacatataaacctcgggttcgatgttatgacacctatcaattatccttgaagtttgaaaggtgtttagattcagaagttgtcacctttgaaattttgtctgatgactactcaaagattgtcttcttacataatgatagatacattgaatttcattcgcaatcaggtttttactacaaaaccagaataccaaagtttgggagagatttctcttaccactatccatcctgtgacttgtactttgttggtgcaagttctgaagtttataggttaaacttagaacaaggacgatacctgaatcctctacaaactgatgctgcggagaataatgtttgtgacataaattcagtgcatggcttgtttgccacaggaaccatagagggtagagtggagtgctgggacccaagaactcgaaacagagttggcctgttagactgcgccttaaacagtgtcacagcagattcagagataaacagtttaccaacaatctctgctttgaaatttaatggtgccttgaccatggcagttggaacaaccacagggcagggaaaaatatttacttccttggagccagagcatgaccttaatgatgtttgtctctaccccaactcaggcatgctcctgacggccaatgaaacccccaagatgggcatctattacattccagttttgggtcctgctcctcggtggtgttccttcttagacaacttgaccgaagaattagaagagaatccagaaagcacagtctatgatgattataaatttgtcaccaagaaagaccttgaaaatttagggctcacccacctcattggatctcctttcctccgggcatatatgcatgggtttttcatggatataagactctatcacaaggtgaaactgatggtaaatccatttgcttatgaagaatataggaaagataaaatacgacagaaaatagaagaaacacgtgcacagagagtccagttaaagaaattgccaaaagttaacaaagagctggcacttaaattaattgaggaagaagaggagaagcagaaatctacatggaaaaagaaagttaagagtcttcctaatattctcaccgatgatcgatttaaagttatgtttgagaaccctgacctccaagtagatgaagagagtgaagaatttaggcttctgaatccacttgtttcaaaaattagtgaaaaaaggaagaagaaactaagactcttagagcaacaagaacttcgtgaaaaagaagaggaggaagagccggaaggaaaaccaagtgatgcagaaagttcggagagttcagatgatgaaaaagcctgggttgaagaggtcaggaagcaacgcagactcctccagcgggaggaaaaagtgaagcggcaggaacgactcaaggaggaccagcagacagtcctaaagccccagttttatgagatcaaagcaggagaagaatttagaagcttcaaagattctgccacaaagcagaaactgatgaacaaaacccttgaagatcgtttgaaaattgaagcaaaaaatgggacattgagtgtatccgacaccaccgttggcagcaaacaattgacattcacgttaaagaggtctgaacagcagaagaagcaacaggaggctgagaaactacatcgacaagaaaggaaaagactccgtcgttcggccggacacctgaagtcaagacacaaaagaggacggtcgtttcattgatttgggaagtggtcctacctgtgattagggaggggtacgtctcccccaaactgatcatcgttagggtgttaaacacagacgaggaaacacacgtttttaaagttcatgtacgttcttgtacacagaggtaaagatttgaaaacctgtgccttgtgggttggactttgaagctggccccgccgacggccaccgcacagccccaggggtgtacttgcaagtcgttgctccctgggaacattgtcctttccccacggctttaatcatgaaaaccaggttggggttttttttttaatattgtgaaatgtacaccatgaaatgaaaggtttatcctgtgccagaaaccaaggtttatcatgctctaggaacttttttcttacactgcctaccgccattcatgattaaaccatccagaaataccatccctgttttacctggtgtctgtgtattgcctgtgtttgtgtttataagtttatgctgataggtttgttcggcttgtttatgtattagtttgggatttgtttttaaataatttataccaagagagtataatctaatggtgcaggttgagagcatcccaaatccgaaaatctaaaactgtttgagcactgtatttatctgttcttgcactgctataaagaactacctgaaactgggtaatttataagtaaagaaaagaggtttaattgactcacagttctacaggtgatacaggaagcatggctgtggaggccctgggaagcttacaatcgtggcggaaggtgaagcggaagcaggtatgtcctgcgtggctagagccagaggaggagggcaaaggggcagatgctgcacactttcaaacaccagatctccaagaactcactaacacagaatagcaagggggaagtctgcccccatgtttcagtcacctccctccaggcccctcctccaacaccgaagattacaatttgacatgagatttgtgtggggacacagagcaaaaccatatcaagcactgacatgacactggaggaaaatgctcattagagcttttcaggttttggattttcggatttgggatacttgactagtaaatataatacagatattccaaaacacacaaaaaaaccaaagtctaaaagacttctggtcccaagcatttcagataagggatacccaacctgtaataatgggaaacaagcagtagaggctgttggttaatcttggcacaagtttaattacaggtttttttttttcctgtttcttaagtacagtcaaacataaacttactggaggaaacatttataaaaataaatatactttcatttg

SEQ ID NO: 18477 - protein, 638 aa, Homo sapiens
MQVSSLNEVKIYSLSCGKSLPEWLSDRKKRALQKKDVDVRRRIELIQDFEMPTVCTTIKVSKDGQYILATGTYKPRVRCYDTYQLSLKFERCLDSEVVTFEILSDDYSKIVFLHNDRYIEFHSQSGFYYKTRIPKFGRDFSYHYPSCDLYFVGASSEVYRLNLEQGRYLNPLQTDAAENNVCDINSVHGLFATGTIEGRVECWDPRTRNRVGLLDCALNSVTADSEINSLPTISALKFNGALTMAVGTTTGQGKIFTSLEPEHDLNDVCLYPNSGMLLTANETPKMGIYYIPVLGPAPRWCSFLDNLTEELEENPESTVYDDYKFVTKKDLENLGLTHLIGSPFLRAYMHGFFMDIRLYHKVKLMVNPFAYEEYRKDKIRQKIEETRAQRVQLKKLPKVNKELALKLIEEEEEKQKSTWKKKVKSLPNILTDDRFKVMFENPDLQVDEESEEFRLLNPLVSKISEKRKKKLRLLEQQELREKEEEEEPEGKPSDAESSESSDDEKAWVEEVRKQRRLLQREEKVKRQERLKEDQQTVLKPQFYEIKAGEEFRSFKDSATKQKLMNKTLEDRLKIEAKNGTLSVSDTTVGSKQLTFTLKRSEQQKKQQEAEKLHRQERKRLRRSAGHLKSRHKRGRSFH

SEQ ID NO: 18478 - DNA, 3530 bp, Homo sapiens
  CDS (508)..(1122)
ttattaaacaatctcatttaacatttaaaagaacaatagtattcactttgcttattgagggtggtactgcagaaagattcagaacataggctctggagtcagactgccaggctttctatcccagcatcttctcttgctcttgcgtgacctggggcagattacttaaatttttttctaccccacatgcctcatttgtaaagtggagttgtagtggtaatacttcatatgattgttggggagattaaataaataatgcatatacagaatttaaagcagtgctgaaacaggaaatatccatgttaaataactgatcattttctttttaaagctcagtttccttttcttctctcaatacttaaaaggtcagaataggtaaatgtaagcaaacaagactgaaaaattaaccagcattgttttattttctaaaatcaggtgggaaagtctgtgtctcatgagaacaaagaacaagattcttattcagtagaaagtgaaaagaaaccagaagttatggctccagtcagttctacacgtttgagcaaacaagtccttcctcatgatagtcttcctgcaaatagccagccatctcggaggggccgctgggggaggaagaacagaaaaacccaggaacgttttggtgataaagattctaaactgctcttggaagagacgtcttcagctcctcaggaacaatatggagaatgtggggagaaatcagaagccacccaggaacaatacactgaaagtgaagaacagctggtggcttctgaggagcagccaagccaggacgggaaacctgaccttcccaagagaagactcagtgagggggttgagccctggcgaggacagctcaagaaaagccctgaggctctgaagtgcagattaacagaaggaagtgagaggctgccccgtcgctacagtgagggtgacagggctgtcctcaggggcttcagtgagagcagcgaggaggaggaggagccggaaagccctcggtcaagctcgccaccaattctcacaaagcccacgctgaagcgaaaggtaacgcatttctttccaggtcttctcttcctccaattccagtttatcttacaccttctcgttttagcttacagttctgaaagagtataagttagaaattcctagtgcattgctttataaaccttaagcctctgtatattgtagctcaagatcttccaagtgaacatttgagatgtgtgtgtgtgtttgacttctttgattcatgggaattcacttagaaatcataagcttatttaagggcttcacctcctgggatgcaaacaaacttttttttagcttactggtttgatgttcaaatcatgacttttaggggcttaaagccctaaaatatctttaaaagatatttttaaagtatgtacagattagaagtgtttatattagaaaaggaggccaaaatattacataattaattggaaagtgaacatagtgctgccctatattttggggtactcagagtccagtagctcatcttgggtgctattgttttctctctactctccccacttctcacacatccctccagtggtttaacgtggtctctcttgctttaaaaatattttctaaactatattccatcataatgatagccaattagttattaaataatgtacaatgatgataatgaattctgttaagccgtttaccagaaacatcccaggctatggagtggattttaagcattgccaggaggcagccagactgaagcgaggctgctccctggaagagccactcagccagcttccagccaaagcagcacaatcgttcctttccttacagggtcttaaaaagcaagacaggatcttttgttttgttttgttttgttttaagaataatatcttcagagcagttttacatttacagaattaatgcaaagaaagtacagagagttctcgcataccccagccagtttcctctattattaatcccttgcgttggtgtggtacatctatcacagttactgaaccagtgtagatacatcagtaactagagttcatactttattcagatttccatagttttccctaacgtcctttttctgttccaggatcccacccagcatatcgcattacatttagtagtcatgtgtctttaggttcctcttggctgtggtagtttctcagaatttccttagtttcgatggccttcatagttttgagaatgactggtcaggtattttgtagatgatccctcatgatattagaatggggtaatatattcttgagaggaagaccatagaggtaaagtgccattctcatcacataattaaagggtacctgttggcatatatctatcagtatgtatagggaagctgggcatagtggtcactcttgtaatcctagctacttgggaggctgaggcgggaggatcacttgagctggaggctgtagtgcacaatgattgtacctgtaaatagccactgtagtccaacctgcgtgacatagcaagactccgtctgtaaaaataaaaagaagcaagtatcaaatataagggtattatcaatttgatttttccctattgaagttaactttgatgacctggcttaagatattgtttgtcaggtttctacttttcttttccctttactggaaggaagtcactgtgcatagccacacttaagatttctaccccctcagagtggaggctcagcataaattatttgaatttctgcttgggagatttgtcctttctccctcatctgtttatttatccaagcatttatttatatcattattggcccagatatttacgtgatacttcactttataatccaatactactgctttttaaaatttgttgctcagattgttccagttttgaccattagaagctccttcttttagtttccctcttgggctgctgctgctttttttttttttttttttttccttccccagatggggtcttactctgtcacctaggctggagtgcagcggcatgatctcagctcactgcaacctccacctcctgggatgcaagcaacgctcccacctcagcctcttgaataacttggactacaggcatgttccatcacgcctggctaattttttgtacttttgatagagacagggtttcgctatgttgctcaggctggtcttgaactcctgagcttgggcggtccacctgccttggcctccaaggtgctgggattacaggtgtgagccaccgcgcctggcctcctgtgtttaacatatatactgttgttgtcattgtggggtctttttgtttgtttttaagcatttcctttctggcactacaagatgcttcaagttcatcttgtatatttcatgcccttgtcctagaatcagccttttctccaaggaccagggccatttttaatctaatttgaaaattacattctcgattgggactattaagtttgaagtagagaaaaattgaacattgactaactgctgttcattgcatgatcatgaagaatagatctttgtcatcctagcacttgtattgccaatttatgaagtaaaacaaatcatgtt

SEQ ID NO: 18479 - protein, 205 aa, Homo sapiens [sequence omitted]

SEQ ID NO: 18480 - DNA, 4425 bp, Homo sapiens
  CDS (169)..(4029)
gtcggtgtctgcgcgctggtgtctgaggcccaggctgaggcctccgctattgctggagcgcaggcggcggagaggatgactgccgctgccattctctcttgagctagcgagccgccgccaccctccaccctcccccggcagggcggagaggagcggccggagtcagcgatggtgcccggcgaggagaaccaactggtcccgaaagaggcaccactggatcataccagtgacaagtcacttctcgacgctaattttgagccaggaaagaagaactttctgcatttgacagataaagatggtgaacaacctcaaatactgctggaggattccagtgctggggaagacagtgttcatgacaggtttataggtccgcttccaagagaaggttctgtgggttctaccagtgattatgtcagccaaagctactcctactcatctattttgaataaatcagaaactggatatgtgggactagtaaaccaagcaatgacttgctatttgaatagccttttgcaaacactttttatgactcctgaatttaggaatgcattatataagtgggaatttgaagaatctgaagaagatccagtgacaagtattccataccaacttcaaaggctttttgttttgttacaaaccagcaaaaagagagcaattgaaaccacagatgttacaaggagctttggatgggatagtagtgaggcttggcagcagcatgatgtacaagaactatgcagagtcatgtttgatgctttggaacagaaatggaagcaaacagaacaggctgatcttataaatgagctatatcaaggcaagctgaaggactacgtgagatgtctggaatgtggttatgagggctggcgaatcgacacatatcttgatatcccattggtcatccgaccttatgggtccagccaagcatttgctagtgtggaagaagcattgcatgcatttattcagccagagattctggatggcccaaatcagtatttttgtgaacgttgtaagaagaagtgtgatgcacggaagggccttcggtttttgcattttccttatctgctgaccttacagctgaaaagattcgattttgattatacaaccatgcataggattaaactgaatgatcgaatgacatttcccgaggaactagatatgagtacttttattgatgttgaagatgagaaatctcctcagactgaaagttgcactgacagtggagcagaaaatgaaggtagttgtcacagtgatcagatgagcaacgatttctccaatgatgatggtgttgatgaaggaatctgtcttgaaaccaatagtggaactgaaaagatctcaaaatctggacttgaaaagaattccttgatctatgaacttttctctgttatggctcattctgggagcgctgctggtggtcattattatgcatgtataaagtcattcagtgatgagcagtggtacagcttcgatgatcaacatgtcagcaggataacacaagaggacattaagaaaacacatggtggatcttcaggaagcagaggatattattctagtgctttcgcaagttccacaaatgcatatatgctgatctatagactgaaggatccagccagaaatgcaaaatttctagaagtgggtgaatacccagaacatattaaaaacttggtgcagaaagagagagagttggaagaacaagaaaagagacaacgagaaattgagcgcaatacatgcaagataaaattattctgtttgcatcctacaaaacaagtaatgatggaaaataaattggaggttcataaggataagacattaaaggaagcagtagaaatggcttataagatgatggatttagaagaggtaatacccctggattgctgtcgccttgttaaatatgatgagtttcatgattatctagaacggtcatatgaaggagaagaagatacaccaatggggcttctactaggtggcgtcaagtcaacatatatgtttgatctgctgttggagacgagaaagcctgatcaggttttccaatcttataaacctggagaagtgatggtgaaagttcatgttgttgatctaaaggcagaatctgtagctgctcctataactgttcgtgcttacttaaatcagacagttacagaattcaaacaactgatttcaaaggccatccatttacctgctgaaacaatgagaatagtgctggaacgctgctacaatgatttgcgtcttctcagtgtctccagtaaaaccctgaaagctgaaggattttttagaagtaacaaggtgtttgttgaaagctccgagactttggattaccagatggcctttgcagactctcatttatggaaactcctggatcggcatgcaaatacaatcagattatttgttttgctacctgaacaatccccagtatcttattccaaaaggacagcataccagaaagctggaggcgattctggtaatgtggatgatgactgtgaaagagtcaaaggacctgtaggaagcctaaagtctgtggaagctattctagaagaaagcactgaaaaactcaaaagcttgtcactgcagcaacagcaggatggagataatggggacagcagcaaaagtactgagacaagtgactttgaaaacatcgaatcacctctcaatgagagggactcttcagcatcagtggataatagagaacttgaacagcatattcagacttctgatccagaaaattttcagtctgaagaacgatcagactcagatgtgaataatgacaggagtacaagttcagtggacagtgatattcttagctccagtcatagcagtgatactttgtgcaatgcagacaatgctcagatccctttggctaatggacttgactctcacagtatcacaagtagtagaagaacgaaagcaaatgaagggaaaaaagaaacatgggatacagcagaagaagactctggaactgatagtgaatatgatgagagtggcaagagtaggggagaaatgcagtacatgtatttcaaagctgaaccttatgctgcagatgaaggttctggggaaggacataaatggttgatggtgcatgttgataaaagaattactctggcagctttcaaacaacatttagagccctttgttggagttttgtcctctcacttcaaggtctttcgagtgtatgccagcaatcaagagtttgagagcgtccggctgaatgagacactttcatcattttctgatgacaataagattacaattagactggggagagcacttaaaaaaggagaatacagagttaaagtataccagcttttggtcaatgaacaagagccatgcaagtttctgctagatgctgtgtttgctaaaggaatgactgtacggcaatcaaaagaggaattaattcctcagctcagggagcaatgtggtttagagctcagtattgacaggtttcgtctaaggaaaaaaacatggaagaatcctggcactgtctttttggattatcatatttatgaagaagatattaatatttccagcaactgggaggttttccttgaagttcttgatggggtagagaagatgaagtccatgtcacagcttgcagttttgtcaagacggtggaagccttcagagatgaagttggatcccttccaggaggttgtattggaaagcagtagtgtggacgaattgcgagagaagcttagtgaaatcagtgggattcctttggatgatattgaatttgctaagggtagaggaacatttccctgtgatatttctgtccttgatattcatcaggatttagactggaatcctaaagtttctaccctgaatgtctggcctctttatatctgtgatgatggtgcggtcatattttatagggataaaacagaagaattaatggaattgacagatgagcaaagaaatgaactgatgaaaaaagaaagcagtcgactccagaagactggacatcgtgtaacatactcacctcgtaaagagaaagcactaaaaatatatctggatggagcaccaaataaagatctgactcaagactgactctgatagtgtagcattttccctgggggagttttggttttaattagatggttcactaccactgggtagtgccattttggccggacatggttggggtaacccagtgacaccagcactgattggactgccctacaccaatcagaagctcagtgcccaatgggccactgttttgactcggaatcatgttgtgcactatagtcaaatgtactgtaaagtgaaaagggatgtgcaaaaaaataaaaaaaaacaacaaaaaaagctaaccttctattagaaaaggggacaggggaatgagtaaacttcttttattgcggacaaatgtgcacatagccgctagtaaaactagcctcaaacaggatgctcatagcttaataataaaagctgtgcaaaggc

SEQ ID NO: 18481 - protein, 1287 aa, Homo sapiens
MVPGEENQLVPKEAPLDHTSDKSLLDANFEPGKKNFLHLTDKDGEQPQILLEDSSAGEDSVHDRFIGPLPREGSVGSTSDYVSQSYSYSSILNKSETGYVGLVNQAMTCYLNSLLQTLFMTPEFRNALYKWEFEESEEDPVTSIPYQLQRLFVLLQTSKKRAIETTDVTRSFGWDSSEAWQQHDVQELCRVMFDALEQKWKQTEQADLINELYQGKLKDYVRCLECGYEGWRIDTYLDIPLVIRPYGSSQAFASVEEALHAFIQPEILDGPNQYFCERCKKKCDARKGLRFLHFPYLLTLQLKRFDFDYTTMHRIKLNDRMTFPEELDMSTFIDVEDEKSPQTESCTDSGAENEGSCHSDQMSNDFSNDDGVDEGICLETNSGTEKISKSGLEKNSLIYELFSVMAHSGSAAGGHYYACIKSFSDEQWYSFDDQHVSRITQEDIKKTHGGSSGSRGYYSSAFASSTNAYMLIYRLKDPARNAKFLEVGEYPEHIKNLVQKERELEEQEKRQREIERNTCKIKLFCLHPTKQVMMENKLEVHKDKTLKEAVEMAYKMMDLEEVIPLDCCRLVKYDEFHDYLERSYEGEEDTPMGLLLGGVKSTYMFDLLLETRKPDQVFQSYKPGEVMVKVHVVDLKAESVAAPITVRAYLNQTVTEFKQLISKAIHLPAETMRIVLERCYNDLRLLSVSSKTLKAEGFFRSNKVFVESSETLDYQMAFADSHLWKLLDRHANTIRLFVLLPEQSPVSYSKRTAYQKAGGDSGNVDDDCERVKGPVGSLKSVEAILEESTEKLKSLSLQQQQDGDNGDSSKSTETSDFENIESPLNERDSSASVDNRELEQHIQTSDPENFQSEERSDSDVNNDRSTSSVDSDILSSSHSSDTLCNADNAQIPLANGLDSHSITSSRRTKANEGKKETWDTAEEDSGTDSEYDESGKSRGEMQYMYFKAEPYAADEGSGEGHKWLMVHVDKRITLAAFKQHLEPFVGVLSSHFKVFRVYASNQEFESVRLNETLSSFSDDNKITIRLGRALKKGEYRVKVYQLLVNEQEPCKFLLDAVFAKGMTVRQSKEELIPQLREQCGLELSIDRFRLRKKTWKNPGTVFLDYHIYEEDINISSNWEVFLEVLDGVEKMKSMSQLAVLSRRWKPSEMKLDPFQEVVLESSSVDELREKLSEISGIPLDDIEFAKGRGTFPCDISVLDIHQDLDWNPKVSTLNVWPLYICDDGAVIFYRDKTEELMELTDEQRNELMKKESSRLQKTGHRVTYSPRKEKALKIYLDGAPNKDLTQD

SEQ ID NO: 18482 - DNA, 2124 bp, Homo sapiens
  CDS (933)..(1307)
tagataggggatagacaaatctcccatgcagaataattccaaacaatttatgtagatatcccactcttaaggaggtatagtataactctctagtccttatgtgtgggttttgtatagtgacatccttccaaagagtacagtatagaaagggggaaaaagaggaactttacagtggaaaaacttgacaaacactactttagctaggtcaaggttaatatcaacagtgataaatcatgttgatagtatgtacccttgatatgatgttatgagaatggtacctttacctttgtggtcttcctcccaacaactcataaaccccgtctaatcatgagaagttagacaaatcccagttgaggagcattccacaaaataccttaccaatattttcctcaaaaccatcaaggccataaataacaagtctgagaaacaataggaaagccagagaaactattacagccacaaggagcattaggagacatgactaaatgtattacggtgttctacagtatgtaaaaagtaaggaaatctgaataaaacaccaattttaattaatgtataatattaatgaaccaatattggtacacttttattaactaaaatccatatttattccgattagtttttacctaatgctgctcattgttttttaatccctattagatggggagcacccacagggcagggattgtgtgtgtgtttcatttacctaatgtgatgccaaacagtaacgggtacttgggaagtatttcttgagtgactactggaaagaagtcttagagtttatagtctgacttaaacttccccattttaggtgagaaaattgcttagggaggcatatgtgtcttctccaagtcccatgggtaattcatggtatagctggtattagacaccacatcttatgatatccagttgctattatctctttgaaactaatgaaccttaattttcttttttttttgagtcagagtctcgctctgtcgcccagactggagtgcagtggtgcgatctcaatttactgcaacctccgcctcccgggttcaagtgattctcctgcctcagcctcccaagtagctgggattacagatgtgcaccaccaggcttggctaatttttgtatttttagtagagacagggttttcccatgttggtcaggccggtctggaactcctgacctcaagtgatccactcacctcagcactttgggaggccagcgcaggtgggtggcttgaactcaggagttcgagaccagcctggacaacatggcaaaactccgactctaccaaaaaaacaaaaattagctgggtatggtgacgtgcctgtgatcccagctacttgggaagctgagatgggagggtcactggagcccaggaagttgaggctgcagtgaaccgtgatggcgccactgtactccagcccaggtgatagagcgagaacctatctcaaagtaaaaaataaagggtaaaattcaacttaagcctggataacagggtgaaactccgtctctacaaaacatacaaaaaaattagccaggcgtggtggtgcatgcctgtagtctcagcctcctgagtatctgggactacaggtgcctgccaccacgcctggctaatttttgtatttttagtagagatgggattttgccatgttggccaggctggtcttgaactcctgacctcaaatgatccgcctgcctcagcctcctgagtagctgggactacaggcacacgccacgacgcctggctaatttttgtatttttagtttgagaccagcctgcccaacatgacgaaacactgtctctaataaaaatacaaaaattggtcaggcgcagtggctcatgcctgtaatcccagcactttgagaaactgaggtgagtggatcacttgaggtcaggagttcaagaccagcctggccaccatggtgaaaccccatctctattagaaatacaaaaattagtcgggcttggtggcacatgcctgtaatcctagctacttgggaggctgaggtaggagaatcacttgaacccaggaggtggaggttgcagtgagccgccaagatcgtgccactgcactccagcctgggcaacagagtgagactctgtcaaaaaaaaaaaaaaaaaaaagaaaaaag

SEQ ID NO: 18483 - protein, 125 aa, Homo sapiens
MNLNFLFFLSQSLALSPRLECSGAISIYCNLRLPGSSDSPASASQVAGITDVHHQAWLIFVFLVETGFSHVGQAGLELLTSSDPLTSALWEASAGGWLELRSSRPAWTTWQNSDSTKKTKISWVW

SEQ ID NO: 18484 - DNA, 4331 bp, Homo sapiens
  CDS (350)..(3910)
agcaactgtttggcagtcagagtcccacatcctgctcaactgggtcaggtccctcttagaccagctcttgtccatcatttgctgaagtggaccaactagttccccggtagggggtctcccctggcaattcttgatcggcgtttggacatctcagatcgcttccaatgaagatggccttgccttggggtcctgcttgtttcataatcatctaactatgggacaaggttgtgccggcagctctgggggaaggagcacggggctgatcaagccatccaggaaacactggaggacttgtccagccttgaaagaactctagtggtttctgaatctagcccacttggcggtaagcatgatgcaacttctgcaacttctgctggggcttttggggccaggtggctacttatttcttttaggggattgtcaggaggtgaccactctcacggtgaaataccaagtgtcagaggaagtgccatctggtacagtgatcgggaagctgtcccaggaactgggccgggaggagaggcggaggcaagctggggccgccttccaggtgttgcagctgcctcaggcgctccccattcaggtggactctgaggaaggcttgctcagcacaggcaggcggctggatcgagagcagctatgccgacagtgggatccctgcctggtttcctttgatgtgcttgccacaggggatttggctctgatccatgtggagatccaagtgctggacatcaatgaccaccagccacggtttcccaaaggcgagcaggagctggaaatctctgagagcgcctctctgcgaacccggatccccctggacagagctcttgacccagacacaggccctaacaccctgcacacctacactctgtctcccagtgagcactttgccttggatgtcattgtgggccctgatgagaccaaacatgcagaactcatagtggtgaaggagctggacagggaaatccattcattttttgatctggtgttaactgcctatgacaatgggaacccccccaagtcaggtaccagcttggtcaaggtcaacgtcttggactccaatgacaatagccctgcgtttgctgagagttcactggcactggaaatccaagaagatgctgcacctggtacgcttctcataaaactgaccgccacagaccctgaccaaggccccaatggggaggtggagttcttcctcagtaagcacatgcctccagaggtgctggacaccttcagtattgatgccaagacaggccaggtcattctgcgtcgacctctagactatgaaaagaaccctgcctacgaggtggatgttcaggcaagggacctgggtcccaatcctatcccagcccattgcaaagttctcatcaaggttctggatgtcaatgacaacatcccaagcatccacgtcacatgggcctcccagccatcactggtgtcagaagctcttcccaaggacagttttattgctcttgtcatggcagatgacttggattcgggaaacaatggtttggtccactgctggctgagccaagagctgggccacttcaggctgaaaagaactaatggcaacacatacatgttgctaaccaatgccacactggacagagagcagtggcccaaatataccctcactctgttagcccaagaccaaggactccagcccttatcagccaagaaacagctcagcattcagatcagtgacatcaacgacaatgcacctgtgtttgagaaaagcaggtatgaagtctccacgcgggaaaacaacttaccctctcttcacctcattaccatcaaggctcatgatgcagacttgggcattaatggaaaagtctcataccgcatccaggactccccagttgctcacttagtagctattgactccaacacaggagaggtcactgctcagaggtcactgaactatgaagagatggccggctttgagttccaggtgatcgcagaggacagcgggcaacccatgcttgcatccagtgtctctgtgtgggtcagcctcttggatgccaatgataatgccccagaggtggtccagcctgtgctcagcgatggaaaagccagcctctccgtgcttgtgaatgcctccacaggccacctgctggtgcccatcgagactcccaatggcttgggcccagcgggcactgacacacctccactggccactcacagctcccggccattccttttgacaaccattgtggcaagagatgcagactcgggggcaaatggagagcccctctacagcatccgcagtggaaatgaagcccacctcttcatcctcaaccctcatacggggcagctgttcgtcaatgtcaccaatgccagcagcctcattgggagtgagtgggagctggagatagtagtagaggaccagggaagcccccccttacagacccgagccctgttgagggtcatgtttgtcaccagtgtggaccacctgagggactcagcccgcaagcctggggctttgagcatgtcgatgctgacggtgatctgcctggctgtactgctgggcatcttcgggttgatcctggctttgttcatgtccatctgccggacagaaaagaaggacaacagggcctacaactgtcgggaggccgagtccacctaccgccagcagcccaagaggccccagaaacacattcagaaggcagacatccacctcgtgcctgtgctcaggggtcaggcaggtgagccttgtgaagtcgggcagtcccacaaagatgtggacaaggaggcgatgatggaagcaggctgggacccctgcctgcagacccccttccacctcaccccgaccctgtacaggacgctgcgtaatcaaggcaaccagggagcaccggcggagagccgagaggtgctgcaagacacggtcaacctccttttcaaccatcccaggcagaggaatgcctcccgggagaacctgaaccttcccgagccccagcctgccacaggccagccacgttccaggcctctgaaggttgcaggcagccccacagggaggctggctggagaccagggcagtgaggaagccccacagaggccaccagcctcctctgcaaccctgagacggcagcgacatctcaatggcaaagtgtcccctgagaaagaatcagggccccgtcagatcctgcggagcctggtccggctgtctgtggctgccttcgccgagcggaaccccgtggaggagctcactgtggattctcctcctgttcagcaaatctcccagctgctgtccttgctgtatcagggccaattccagcccaaaccaaaccaccgaggaaataagtacttggccaagccaggaggcagcaggagtgcaatcccagacacagatggcccaagtgcaagggctggaggccagacagacccagaacaggaggaagggcctttggatcctgaagaggacctctctgtgaagcaactgctagaagaagagctgtcaagtctgctggaccccagcacaggtctggccctggaccggctgagcgcccctgacccggcctggatggcgagactctctttgcccctcaccaccaactaccgtgacaatgtgatctccccggatgctgcagccacggaggagccgaggaccttccagacgttcggcaaggcagaggcaccagagctgagcccaacaggcacgaggctggccagcacctttgtctcggagatgagctcactgctggagatgctgctggaacagcgctccagcatgcccgtggaggccgcctccgaggcgctgcggcggctctcggtctgcgggaggaccctcagtttagacttggccaccagtgcagcctcaggcatgaaagtgcaaggggacccaggtggaaagacggggactgagggcaagagcagaggcagcagcagcagcagcagcagcagcaggtgcctgtgaacatacctcagacgcctctggatccaagaaccaggggcctgaggatctgtggacaagagctggtttctaaaatcttgtaactcactagctagcggcggcctgagaactttagggtgactgatgctacccccacagaggaggcaagagccccaggactaacagctgactgaccaaagcagccccttgtaagcagctctgagtcttttggaggacagggacggtttgtggctgagataagtgtttcctggcaaaacatatgtggagcacaaagggtcagtcctctggcagaacagatgccacggagtatcacaggcaggaaaggatggccttcttgggtagcaggagtcagggggctgtaccctgggggtgccaggaaatgctctctgacctatcaataaaggaaaagcagtgattcatt

SEQ ID NO: 18485 - protein, 1187 aa, Homo sapiens [sequence omitted]

SEQ ID NO: 18486 - DNA, 4122 bp, Homo sapiens
  CDS (14)..(685)
acattgtagcaaaatggcgactgtcattcacaaccccctgaaagcgctcggggaccagttctacaaggaagccattgagcactgccggagttacaactcacggctgagtgcagagcgcagcgtgcgtcttcccttcctggactcacagactggggtggcccagaacaactgctacatctggatggagaagaggcaccgaggcccaggccttgccccgggccagctgtatacataccctgcccgctgctggcgcaagaagagacgattgcacccacctgaagatccaaaactgcggctgctggagataaaacctgaagtggagcttcccctgaagaaggatgggttcacctcagagagcaccacgctggaagccttgctccgtggcgagggggttgagaagaaggtggatgccagggaggaggaaagcatccaggaaatacagagggttttggaaaatgatgaaaatgtagaagaagggaatgaagaagaggatttggaagaggatattcccaagcgaaaggacaggactagaggacgggctcgctgccctctcccttccctgcactgtttttcctcccttccctctgccgtgatagatgctaaggagtggggtggaggtgggaagtgggaagcaacagtggcgtataggaaaaagaaaatataccccgtgcacattttcaacatgtagttgaagaagcctaaattaggtactagaaaaaaaaaaaggacagaaacactgcctgatatgtgagcaagagcatgaaaatatagaatgattatctcagagcagaggaggtggggagcaggtggctggagagaggcggggtaggtaggcagggcgtccctggctcaccaatgcgtctggtccacatggcatttgggaaagcagatgggtcatgcttttgcaatgaatggtcagatgcttagggggcatttgtgctcctctggccaggaaagggaacagagtccatccaagctgccccccactcatctgccatggttgtccaccctgggggtttttcctctgaaggaaaatgaacccatcttttgcctgccatgaatcattgcagggcaggctgttactggctaaattaaaacccttggcagggcatcgactgtgtgcgaggcaatgctctaggtcctgtaggggctggaaaataaaccgcatgctggcctagccttcaagttgcttttcagccatgaaactaagctctgccaagcaatcgtgattgtaggtcaagtatcgcgccatcacggaaggtgtaagtatatgtaggtttctctgttgaggatgcgtgttcctcagtagaagacaagcaggtggaggcatccagtgatttctaccctgtggaggctgaggggtcgggggaagaaaacagatgacctcagcctagttgctttaatctgcttttccaagcactggatgcccttggatgacagcatcctcagcattaaaactggtgaactgatgaagtcacctggcctggagtgtgttgggcagccagtgtccccagagctgcttgtgggtttctggggtggaaggcagggaggtgcaactggcagggcctgatcagaggcagaaaatgacccccacagtggtcttttccctgctagagaaagcagagagcgggactgggggggtgggggcttcaagtacagattgggcacactccaccagaccccagcaaggtcagctgccccacgcctgtatctggcactgctggtgtgtgcagggatgaaacccagcatcagagaggttttcagcaaaccttccatgctcacctttggccaggtgcttgtcagatcctagcttcgtgctggcttagactctcagttgtttgtgttgacagcattaggaataaaccgtttgtttcatctttccttttctccacacgtgtcacagccagatttcagctttgagttattccctgaagaagccacaccaaccttgctttcaagcaaaatgcctgggcttgggggaaggtgtgtatctgtccatgtgtggatgtcggctcagagctatagcttctctgtggggggtggcccaagggaaggctcctctggggccctggatggcacatgactcccagtgaggagaattcaggtgatctctgtggaggtagtcagggacacaaggcttggctgtgagtctggttttaaagtgcgtgacagcctgaaaagcatgcaggggtttggtccactcacctacttgaaagcctgtgggcaacgttcttttgagccaagacttctctgaatggccctgctggtggaaggggtgaggcaaaggcctctgacttggaccctttccacaccagactggcagcacttcccccaggcagccagtggtgggccctgagccctcaggtccccagctccttgagggatgaacctgggagcccaagagccagtggctgagctctgagaaggctccatctcccacctgcccttgagcgcgctctcaggctgagaacacggtctcatcaggcgccttcctggcctgatgctgtgctgtctacgtcacacggtcgattcacaaaagccagaactagacctcaaccaggtcatctccccgttgccaagtgggttcagggtgagggcaatttgtaagctcaatttctctgacagccaagacatggagcatctctgctaagaagccaaaagaaattggttttcttcttctcattgctgaagcccctctgtgtctcttctcagggacaggctggtccagtggctttggtgagggcgcctccatttgtgaacgctgggattcctctgggtgggctttggcaggtggctcctatggtaggaaggatgaccaggtccctgggaatgagctgcctacctgctgctccacgaggaagctcaggcctgcacaggctccaccaggccttggatgccctctagttgagtcagagaccctggaaacacactgagatctccaattgctgcctccattgatgtctctagacctgcagatacgaagcaaacctgggattgcttcttccaggtatgggcaccagagagggaggccactgcaacattttatccccatcattccaaaatgcttgcttgtctcttttacctcacactcacaactccttctgagactctcagtcataaaggaatgaccaagagagtgggtctccagtgagagaaatgcctatgaaagagggtttccctttttgctcttttgaacaccctccccactgatccttgggacccaacgccgcattgcctcttgcagatgaggttttgccttgggctgcttgggtacttcagaccaggactgagtctgacacagctttcatgaggttacagaaaagggctacagatttgggaagctgtgtgtaatggtcttgagacaatatctccatttggcccaccctggcttctctaaaaagcaacgacagcaacagacaaacaaaaagctcccacctcccaccccgttagctgtcctcctccttcactgtgatgtggttgcggtctctgtaggtgtgtgtgccacccttgtcctctgtcctctggggatgtgcccttcccacgtgtgtcaggttcccactctttcgtggttcctaacgtgaagtgctgtgatgtttctgccctgcctaaggaacgtatcaagctctctcagtgtttcagtgttggagattgaggctgtgccacatcttctgccatcctaaggggacatgatggttctgtgattcccagagagctggcagattgtgacaatctccaggagaacctacagattggaagcagcccacacctgatgtggactcctgtcccgggactcactcttcattcagaagactggtggcccacgtgccaggaccaccccacctctcttgctgccttttctcctgtcctgatggggttctgggagggagacctgtcgctgatgagatgaagaatgtggggatcgagcagccttcttctttgggacccctcgatatcccatggaatgctcgcacgttctcaaagactgagtcacaagcccctaccccttccttgctgtggttagtatcttgttctgtgattggttagcaatgttgactacccacgtagtgaatcttttgtctgcaatttagagaatgtgtaaacaaataaaaggctttaaaactc

SEQ ID NO: 18487 - protein, 224 aa, Homo sapiens
MATVIHNPLKALGDQFYKEAIEHCRSYNSRLSAERSVRLPFLDSQTGVAQNNCYIWMEKRHRGPGLAPGQLYTYPARCWRKKRRLHPPEDPKLRLLEIKPEVELPLKKDGFTSESTTLEALLRGEGVEKKVDAREEESIQEIQRVLENDENVEEGNEEEDLEEDIPKRKDRTRGRARCPLPSLHCFSSLPSAVIDAKEWGGGGKWEATVAYRKKKIYPVHIFNM

SEQ ID NO: 18488 - DNA, 2102 bp, Homo sapiens
aatgtgaaaataaaaggacagagaaaattttccttgtaaatattaaaaaagaaaaatatagttacagtaatatcaaaaaataaattttcagacaaaaagcattactagagattaaaaaaagagacaatgacaaaagaatcaattcatctggaagctcttaatttgtcttgatgtacctaatgacataaccttaaaatgtaaaaagcaaacattgacagaactacaaggagaaatagaaaatacaaaattataataggaaagtttaacatgctttttgtttttttaccaattgacagaacaagcaaacaaaaagtaggatatagacattttaaataaattgctgtacttgaccaaataatgccatgtgtgaaagtagtgagtacacacatgccctcacacagagtacctatcaatagcagaatacatattcttgtaagtgttcatgcaatatttattttaaaatgacgatctatggagccaagaggatttcaaaaggattgtaatcatagatagtgtgtccttagaccacaatgcaattatgttaggaatcaataataaaaactaatatctccctctccctctccgtctccccacggtctccctctccctctctttccacggtctccctctgatgccgagccgaagctggactgcaatgacgtgatctcggctagctacaacctccacctcccagccgcctgccttggcctcccaaagtgccaagattgcagcctctgcccggctgccaccccgtctgggaagtgaggagcgtctctgcctggccgcccatcatctgggatgtgagaagcccctctgcccagctgcccagtctgggaagtgagaagcgcctcttcccggccgccatcccgtctaggaagtgaggagcgtctctgcccggatgcccatcgtctgagatgtggggagcgcctctgccccaccgccccgtctgggatgtgaggagcgcctctgcccggccgcgaccccatctgggaggtgaggagcgtctctgcccagccgccccgtctgagaagtgaggagcccctctgcccggcagccgccccgtctgagaagtgaggaccccctccgcccggcagccgccccgtccgggagggaggtggggggcagcccccgcccggccagctgccccgtccgggagggaggtgggggccagcctctgcccggccgccgccccgtccgggaggtggggggcgcctctgcccggccgccctttctgggaagtgaggagcccctctgcccagccgccaccccgtctgggaggtgtacccaacagctcattgagaacgggccatgatgacgatggcagttttgtcgaatacaaaagggggaaatgtggggaaaagatagagaaatcagattgttgctgtgtctgtgtagaaagaagtagacataggagactccattttgttctgtactaagaaaaattcttctgccttgggatgctgttgatctgtgaccttacccccaacccggtgctctctgaaacatgtgctgtgtccactcggttaaatggattaagggtggtgcaagatgtgctttgttaaacagatgcttgaaggcagcatactcgttaagagtcatcaccactccctaatctcaagtacccaatgacacaaacactgcggaaggccgcagggtcctctgcctaggaaaaccagagacctttgttcacttgtttatctgctgaccttccctccactattgtcctatgaccctgccaaatccccctctgggagaaacacccaagaatgatcaataaaaacaaaaacaaaaacaaaaaaaactaatatatattttcccaaattttgaaattaagaaacattcttctaaataactcatgagtccaagaagaaataataatcaatgaagagttccttctcagtttctagcatatgatgattagaaaagagttcttaaaaaaatagtgaaaatgtcctagctttctttaaataataataatgaggggctgggcataatggctcacacctgtaatcccaacactttaagaggctgagatggaaggattccttcagcccaggagtttgaaaccagcctgggtaacatagggaaatcctatctctacc

SEQ ID NO: 18489 - DNA, 3551 bp, Homo sapiens
  CDS (291)..(827)
tattgaggcactggcccagggaactgagccttgggcctgtcctaaagctccataggtgactgcactgcagcccacatggagagctgcagctctaacacagggattttgagaggcctcagtgccatttaagtggcacttccaggacacccatcctgagctcccacaaagggcgccaccttcccaagaacgtctaattgtcattggaacagccagtgtcaggcagcttctgctcaggctgatgtggcgtctgacccttggtgggttgccagacattccttcctgtttctgccatgggaagttggcactgggaatggtatggagcccccacttctaccctgagccttgggtgtctgctgcttccaggtgaaaaatggacatttctgatactgcccagccactacggcaccacaacccatgctcatagtctccagggatgtgtagaacggcaatggcaggacagcaaacaactggcgatttccccaggtcccacgctcttgcggagtgagtatgttgggtccctgtccccagtgtgttccagccttacccaggtgcacagagtaccctggggccagcacagggcttgtccagtgatgctcctggtgttcacaaaatggctccagagatacctgcattttgaaaagcctgccgagccagcaagtgtagggcaggacccggatttctttggcaaatctgaaggtgagagggccacttgcctgctgagtagaagctgcctttacctggccagtgtatgcaacttgagagaaaatgacagctgcatggggcgctctggtgggactgggaagtctgatcttccggggagctgtagatagtgaatttcaagttgacagctaccttctcagggatttatatataaatatagttagaggaaaagctaaaatctattttactagtttttagtgtttgtgtaaagtaagcttaaactggacagaataaacatttctcagacaatgttgatgctactgattacaagttagatggctggagcttgccccttggtggagaatttctcggtgattggagactggggactctggcagcagaagtggctttatggtgggtgtgaagttgcttctgcccctctgagtggcctctcatggatgtgaatgcgtgtattgacaccagtgaaatccacctccgtgtgcgtggaggtggctgatgagaacacaagtgagccagtcctggttcttccctccagaaccggtcactcccagtctgacgttggagcatgtgaactaagagtgacatttttttctacttgcttctgtgaataaagtgttctacagtcagccagcactaaacaccagaaaggaggagggaacagcgtggagcaattcatctggaattacctcggtgtgcagaggctgtcccttggctccacttgggataaacattgtgaaacatcgtgggcctctttcttctcaagctcctcctgacagcctcctggcaacactagaggcctcaagactatggagatcagaattgcaatggctttgtcatctcagcattgaccactcctgagacccaaggttcctcctgggagcaggagacaaggagtttgtgatgttggatggaaaataggatatatgaatgcagaagggctgtgctggacccctcttttcgcttctctccctgctgtcagcagtgtctctggcatggaggcgaatctgttgtgggtgaagcagaagcccctggggtaggaccagaccccaggcctgaaaaggatgcaaagcctgctgtttcaggctgtcaggaagaatcgtgggtaccgagtgattatgatgaaatgcaacccagagaggaaatgaatgggccctcactaagaagtgggtctgacatgtctctggcagcccaccggcaagagcacgacatgccctgcagccccaccatccacactacatgatgtgggagggctgtctgttcattcttacactggggacccaagcctgctctgaggagtgagtcacagccctgacgtgcgccttgcattactgtttcctgagatgtgcccggagactcaagcttgctcatttctgtcctgacacagctcactgttccttaggtggtcatagtcctcccgtgctgtgtcagctcctacatagcattagtctttcacgtgataaagtgcaagcacttttccattttacagtatttggggaaattctaacacactccccagggatttgtgcatgtccttctgcctccccggtgggtcattctgtggattccgcacctggcagtcggtcttcccccttggaagcccctaggatccctgtttctacgggcctggtccttggtttctaccccagtcccttttggccggcacctgcctggaactgcctggagcgccatggtatggggaaggacaggtggaaccctgaccacaacagatccttctaaaacaacagtcacattgatgatgatgagtgcagtggggtgaatgtcgtcacagcatgcatgctgggagctgccaagggcttacaacaaaagcagttcttcctaaggcaccctttgcatcttcccatccacgcctctcagtgcatttggaacttgcttatgcattggaataacttgagtcagctgctcgtttctgtgcctctgcactcacaggttccttcattaacattttaaataagtggttaaaaactcctctggaggttgtttttgaaagaaacagggaaaagaaaaacacacactacctgaattgatttgagtaattttccagtgactcagttgaaactcagtgttgcatacataatttcctcatgctgagccagcctgaaataagacttgataagaggcacagccctaagtagcaggcagtgccactgtggacagtgtacactatggtgtgagtgtgtgcacaggcgagcctaagtgtgtgtactcatacacacagataaaccgaaaggacactgggctttgtgctggcaaaggctgtgatgctgctgtggctttctatgggccctggggagtgtcagatgggaagtgctttgatggcatgttgttcagtgtatttaatggggtctcccatggcccgaggacccactgtgagcactccacccactgtggcgcagaacacggctggagtcatcatagcccaggtctttattgaaagggagtgttgacccagaagcctcatatagaaaccatttggcaaggtctggaccatctctctgcaactgacctgccttggccgcacagagggacccaaacccaaaaggcccagacccaagggagactgaatcacatttaccattacaccagctttcatttatttgtttccatatgatcatagggactgtattactaagtatgcttataaatgctatttacagactgttcccttttataaggtgaaagattaataaagaacaaaaaattgcctgtagaaaaccatgcctgaggccaggagcagtggctcatgcccgtaatcccagcactttgggagaccaagacaagcagatcacccaaggtcaggagttcaagaccagcctggccaacttggagaaaccccagctctacaaaaatac

SEQ ID NO: 18490 - protein, 179 aa, Homo sapiens
MGSWHWEWYGAPTSTLSLGCLLLPGEKWTFLILPSHYGTTTHAHSLQGCVERQWQDSKQLAISPGPTLLRSEYVGSLSPVCSSLTQVHRVPWGQHRACPVMLLVFTKWLQRYLHFEKPAEPASVGQDPDFFGKSEGERATCLLSRSCLYLASVCNLRENDSCMGRSGGTGKSDLPGSCR

SEQ ID NO: 18491 - DNA, 3462 bp, Homo sapiens
  CDS (2297)..(2692)
ctccgagcactttgttttcacttcctgacccgtctcagaagctcaagtggttgaatgttttagcctcagaatctttttccccaagccttctcaggtggagccccgctgtaccagacaccacagcacagctctgtgaggctgtgtctcttcactctgtttctggggctgctgaggcccctgggaagccctggagcttgccagagcagagcgagaaagtctctggtcctgtttaaatgcctccgcgttttatctgtgagcgccaggctggagccactccctgtcttctcacagtgcccctgcaagttgcagcctcagttttccagtggctcgtggggtagcaggtgctgcgtcatatggtttgggacctctgtggctgcttccagcctgctaatagaacctctttccaccactgccttcatctttggggtggcacccctgagtgctcaggcctgagggcgctcctgtgtcctcactcgggacaggcagcctccactctgggagctcccatccctcgggatgcccaggagaggccatactttcagggtggcatggtgaattcaggggttaggatgggtaggtggtctttcagccccttctacgttggggttggtttacagaacacctgtcctgcctgtgccagcctggccttctgcgagcaccccaggcacgctgtcctggaagttgtctgtctcctgcataggagggtctagagcagaccttgccctgggcctgtctgtgcgtgacttccatatgcttcattcgtgctcagccatggctgagcatgcgatggagagcacctggactgcccctgacgtcgcaggccactgctcttatccagtgggccaagtgattgattgctagtggtggagttgattggaagaaaggaagtcgcagcccctgcccacggcttccccagctcgctggggttggaggactgtcatcagttgtccccagttaaagtccatttggaggaggttcagggtcccagtggctggatgtgcttgtggagggacacggtttgaggcaggggtttgcagaaggtgtagactgcatccattcttgggaggctgtggcacagggcagcgacaacttgggacaaatcaagacccgtccacactgcacctcagggacctcacctcacgccccacataaatgtgcttattggggatccgggtgtggtggcttctgcctgaaatcccagtactctggaaggccacggcaggaggatcactttagttcaggagtttgaaaccagcctgggcaacatagggagaccccatctctacagaaagtaaaagaaaatgagccaggtgtggtggcatgtgcctgtaaccccagctactcaggaggccgaggcgggaggatccccaagcccgggagtttgaggctgcagtgagttatggcctctgcactccagcctgggtgacagagtgagagacctaatctctaaaaacaaaaaataacaaaatgtgctttggggtcaggtgtggagatcagggtcggggaggtcatgaggtaggtaggggtcaggatgtggacagtcatgggctggtgggtgtggcagccgtgaggggtgggtggtggcctgggaggcagggcctgggcagggcttctgcacttctgctgcttacccagccccctctgggttcgaggactctccttgacaagggctgagctctcgggcactgcgttggactcagctgcctactgggaggctggggagaatggacctgtgagaccttgtttgtcctcttccctgcccagctcttgtagaccccaggcctggctgtccgcagggccaggagctgcagccatggcagccaccagcctcccacatgagccccagctcccagccccacacgcccactcctttgcccatgtggtgtcagctctggcctctgcttccacacatggaccctcagaccttgcacatctgttgtttcccttgcagggcagtgatgatgacatgaaatgaggtggggtcactcctgtttagggatgagactggggcccagggaggggcaggtgtgaagttgctgagggcagagggagacccagggctacctgctcctaatgaccagcctcacgttctccactgctcactccctgctgttcaccagctgcatgaccttgagcagtgcactcaactgtaaacagaggtgaaaacactcctttaccaactgttttaggggccactcttgtttgaggccttgaacctcctttcagttccgtggtggtcctgagcctctgaatctgggtatggcccctgctgggtcctggtctcttaggcagcacgatggcctccctgctcaaggccctgcacccaggggcagattgtgggaggcccactggccatggctgggccctatcgcagagagcctgtcagcacggccatttccacacccaggctggctgggaagcaagctacgaggtgctcaaaggccctctatgtctgcaggtagccccgtcccacacaggcgaggatcgttgggcctccttagtagccaaaggaactgaggtccagagcagggaatgtgttgcccagtgtcagcatggtctgctctggggtcaggcgtcttgccctggtcctaagccaccccaagccaaggcatgtccctgggcccatttcctctctcgaggtcttgggttccctatttctgatgtgtgtgaaaggaaggcctgtcctctggggtgaccatgaggctcagtgggaggagctgccaggcttgagctgggacttggcacctggccagccttttttctatttcattgtaccttgatgggctgtcagttctgaagagaaaaaatacactaggaatccattcttcctccaccattctccctggcagagggaagtgactacacccctatggtgtggacatactgacgctcctccatgaagcagcaaagttctgttgtttcaggagactgtgggccttgaggatgtggtagtgacctcaccagaggagttggcaattcctaagtgctgcctggaggcctctacagagacataatgttggagaacttctgccacatggcagtgctgggtaagacccctctgtccccaccagtgcccttgaggttatgggtgttggtaggtctgtggcctccatctccatgacgatggtgttaaggactgcatgtttgtgtccccccccaaagtttatatgttgaaaccctgacccccaggagggtggtattaggaggtggggcctttgggaggtgactaggcttaggtgagatcgtgagggtggggctcgccgatgagatcgagtccttataagaaaaggaaggaactagagcgaggtcactttgtgctgtgtgagcatacaagaaaactgccatcttcaagctgggtgcagtggctcacgcctgtaatcccagcactggaaggccaaggcattaggattgcatgagtccaggagttcgagaccagcctaggcatgataagaccttattgct

SEQ ID NO: 18492 - protein, 132 aa, Homo sapiens [sequence omitted]

SEQ ID NO: 18493 - DNA, 2039 bp, Homo sapiens
  CDS (130)..(630)
cctttgtcattctagctgcctgctgcctccgcagcgtccccccagctctccctgtgctaactgcctgcaccttggacagagcgggtgcgcaaatcagaaggattagttgggacctgccttggcgaccccatggcatcccccagaaccgtaactattgtggccctctcagtggccctgggactcttctttgttttcatggggactatcaagctgacccccaggctcagcaaggatgcctacagtgagatgaaacgtgcttacaagagctatgttcgagccctccctctgctgaagaaaatggggatcaattccattctcctccgaaaaagcattggtgcccttgaagtggcctgtggcatcgtcatgacccttgtgcctgggcgtcccaaagatgtggccaacttcttcctactgttgctggtgttggctgtgctcttcttccaccagctggtcggtgatcctctcaaacgctacgcccatgctctggtgtttggaatcctgctcacttgccgcctgctgattgctcgcaagcccgaagaccggtcttctgagaagaagcctttgccagggaatgctgaggagcaaccctccttatatgagaaggcccctcagggcaaagtgaaggtgtcatagaaaagtggaagtgcaaagagtggaccttccaggcagttgcgtccatgacaccaggaagatgtcagtgtgtgtttttcatttgatttatttatcttggggaaagtgaaaaatgtaatctgcaagttaatgaccctattggcttgtgtacatctatatgctaaaatgacttccccacattgacatttgtgcgccacctttaatcactctggggcaactctcacatcttgctgcatgtacatgtatacggctactattgaagtgtaattgtgagatggactccaacaagcatgtgactgtgagattgtgtgtgggaaaatgtatttaactactctgtgtgtgtgtgtgtgtgtgtgtgcgcacgcgcgcacgcgcacacactcacgcacacacaagcagagaaggcgctgatcttgaactaatcctgcacaggcatccttccctttatagattgattccagcaaaggcggaataaaacaaatttcctatgaagagaatcctgatatgaaacaagtcatgtagtctcatggccgggaatctctccacagatactaacaacttaaacttactactttaggagaaaaaaaaaaacattcaatttcggacactgagttatatatgaaattaattaggctctagtccaacagttgtttacattttaaatagtccatattgaatttaattaaaacaagggatgcatgcagtcaaattgatagtttaattcttcaagtgataatataggaagtttcaccttgcctttgtccaagccccacctattaaaaccctttactcacagtttgaaactgaagcagtaaacttgtttccagacatctttttcagattgtcttaagcccaaagttgcctcacttccactattctcagcagccaaccaggatttggcagctgctccactgttacggttgagggaacagggatcagccctgttagaagtctgtgagcctcaaactctacctgttctctgcaatcatccaaaatttgaaaaagaagctatatccagtgtttcactgccaaacagattcactactcttactgattcttcactgagctttgctagtataagcagagttccaagtctcccctagggttgtctctacatttctttatcattccagtgggtagggtttagctgggggaaggacatttcataagggttagttggactgagcagtatggacatttgcttttttcattacgtactgttgtttttccttgttaggtgtgctttggtggttttaatattattgtgccagggatggggaaatggggggggttgtgtgggaagagtacttattattgtgttttcttcagtgtaattgttcttggtaattgatacctctctgttttatttctctcattctttcaaaataaaactttttgaaatttggagg

SEQ ID NO: 18494 - protein, 167 aa, Homo sapiens
MASPRTVTIVALSVALGLFFVFMGTIKLTPRLSKDAYSEMKRAYKSYVRALPLLKKMGINSILLRKSIGALEVACGIVMTLVPGRPKDVANFFLLLLVLAVLFFHQLVGDPLKRYAHALVFGILLTCRLLIARKPEDRSSEKKPLPGNAEEQPSLYEKAPQGKVKVS

SEQ ID NO: 18495 - DNA, 2620 bp, Homo sapiens
ggccttttttttttttttttttttggcggcggacggacagggtcttgctctgttgcccaggctggagtgcactggcgcaatcacagctcaccacagccacaaactcctggactctggtaatccttccaccttagcctccggagtagctgggactacaggcacgtgccacaatggctggctaatcctttaatttttgccgatacaagatctcgctgtttctcgggtcgacaatttcttttcttttttttttttgagacgaagtctcgctctgtcgcccaggctggagcgtagtggcgcgatctcggctcactgcaagctccgcctcctgggttcacgccattctcccgcctcagcctcctgagtagctgggactacaggtgcctgccaccatgcctggctagtttttttttttgtatttttagtagagacggggtttcaccatgttagccaggatggtctcaatctcctgacctcaggtgatccacccgcctcagcctcccaaagtgctgggattacaggcgtgagccaccgcacctggccgagacttaaactttcaacaatctgatgggtatgaaagagaaacttgtagtttttaatctgcatgtcctgtaaggataatcatgttctcagaaatgtttattgactatttgggccatctatttaaattttttaaactttcatgttcccttttattctgttatcactttctcatagtgattaatagtagaaactctagttttaaaagttaatacacataaagtgctcagaagagtcacagccatgttgttggagacagtattatttttatccttttaaatacgtatatattggctgggcatggtggctcacgcctgtaatcccggcactttgggaggctgaggcggacagatcacctgaggtcgggagttcgagaccagcctgaccaacatggcaaaacgccgtatctactaaaaatacaaaaattagccaggcatggtggcaggcgcctctactcccagctacttgggaggctgaggcagaagaactgcttgaacccaggagcgggaggttgcggtaagctgagaccatgtcgttgtattccagcctgggcaacagagtgagaccccatctcaatacatacatacatacatacgtatttattgagacaggggtctcgctgtgttgaagaagctggtctctagccccaggcctcaagctgtcctcctgtcttggcctcccaaattgctgagattataggcgtaatctcactgcacctgtccaccattttagatactaatcttgccaaagttatttttaaaatttaatctcatttctttgagtgtttctacttatattttctaatcttttatgataaattatttcagcaattttagcattcatgactttaatccttttgtttcttttctagtattagtttaaaatgttccatttctgttctctttgtgtatctcagttcttgcttcaatgacagcaaataaaaatcctggtcttgtggaacagctgagtagtacatcctttcccaaactgggggagggtggttgctttacccccagctgtcccagcagctgctcagccagattcccagatctagcatctttcaaaacatctcaaccttggtaactcagataaaagtctttctgaggcgtaggtcctcctgtgtcaatggcacatctgaattactaacaacgtgttcttttcttaagttatgttatctagtcagttgatcaggagttatatatactgtggaccctgaaaacattatccctgcattattgagtaaatcatgtaaatactgcgagaaggtaaaaaacaccacaaaagcaatgtggcataacactttgtgcattacataggcacccaatacatattggtgattgcctagtaaaaaatagagggctctcagtgctgcttacctgcctctaataaaaatgtaggtggtattaaaccacaagctagaccatcaggaaggaggtacaaggatagatccacaacctgctcttggcctttatctcagcaagctacctggcttctgtactcctactttgattcacctgctgttgcagcagggttttaggaggatcctatttgtgtatctaagattcaacattcatgaaggagcagaaatacttggatttgcctcttagctcttggagctggagagtggatgacttcctgcaaggcacgatttttggattggcttctcaattattacaggaatcctcaacttttagaattgccagcctattcatctgatcttgaaagtgtacaaacttaccttcaaacagtgtagaatatatgcaattctggacctagacagaggcaataacctaaagacatttgcagctcatttcttgtcagaacccattgagaatagtggtattgatggaagactgtcaagcccatccagttctctagtctaaatagtctcagtttatccatgacttgagccatctaaaagttgcataacaaattagccgggcgtggtggcgcatgcctatagtcccagctacccgagaggctaaggcaggagaatcacttgaacccagaaggcgaaggctgcagtgagccgagatcgcaccactgcactccagcctgggtgatcgagtgagactccgtctcc

SEQ ID NO: 18496 - DNA, 4240 bp, Homo sapiens
tagttcaactttcccatgagagtttttggaggaggtgtctcagggttgtcagggtcggccccgcctgcctctcaggtgtgtgtgatttcaggtgattacgtttttgaagaagaaggacaagttcatcagcctggtgttgaagcacatcggcacctcagcgcttatggacctgctgctgcgcctggtcagctgtgtggagccagccgggctccggcaggacgtcctgcacgtgagtgcgggagttccccccgttcccgagggcaggggtgctgcaggaagccagctggttaagtgcaggagctcagagcaccagggcgcccggcccccatctctccacctagcgtgcatttctccgtggggctgttaggggttcttgtcaaggattgtggcctgtaccttttccactgtcccgacttaactcgctcagaagcacagagcagagaggtcccttctccccgcagtctccagcctccggctctgtgaagaggccgaaatggactttcctcgcctgcctccttttcccctgccagcgcccacccctgtggcttagagcaggaggtcagtgaggtgctagccctgcgtccaggcctgtgcctgccaggagagccccggtggacagcagttccctgcagagccccgttgtttaccctggagtgtggatgcgtctgttctgatggtgtttagtcagtgagaacaggtgctacagttcccgaaaagaggaggatgccccccagagaagcccaggaaatccgtgctgacaaacttctgctcactgttcggccagctttgtttgtggtgaagtttaaaatagagtagagtaaaccctgaggcgctctgcctgtttcccagctcctggaatcaggactcatccgatgaccactctcactcttaggttagtaatgcttcctcagggaggagcttctcaccaggaatgactgaccgccaccaacctttacacagtggacacaggatcagtactagctgtggtcatagccgttagtgggaagcctgcagaactgtacgtcaggcagccttttagctgctttacttgattcacttcacgaagtagccacggggggacagctcatcccatttttggataaggaatttaggcacagggcgcagcagtgcggtgcggtagtcaggtacggcccaggcctgccagaccccgacactcacactgggcccccgttgcccttgagctttaccccacagtgttcgtgtagcctctccagggtggagttactcttcctcaacatgggaaggccccagtgctgcagggaacagctgaggcttctctggcttcagcatccagcggggctcctgagctatagcttgtgtggctcatttgcaccctggtccttaagagagaagtcctgaagacagagcttacatacgcaccattaggacagagggatggtggtcaccctttatcatcttttgagccactcccagaacctcccagaactcagtcattgtgtgttatgtgtgttctttctgggtctggggtgtgtcaggcaaagagtctatattctagaaaacgggtgcagtgctgcaccaaaggggaaaggttcctgttgtttacttagacttgagcagcgacactgaaaggcctctttttctctttcagtggctgaatgaagagaaggtcatccagaggcttgtggagttgatccacccgagccaggatgaagatgtgagtgtgctgcttaccgagcttcgtgcatcagtccaggcctgtgctgccaggtcacccactgctgcgggccagggggcgagggagggcaagtcatccctttcctaagatgaggatcggttaggtacttttctttctttaatcaagcactgacttctaggctggatttttttttctttttttttttgagatggcgtttcgctcttgttgcctgggctggagtgcagtggtgcagtctcggctcaccgcaacctccgcctcttgggttcaagcaattctcctgctcacccagtcgggtgagccaccacacccagcctctaggctgttttcttcttgttgttgttgttgtttaaatagagatgaggtctcactacattgctcaggctggtctcaaaaacctggcctcaagtgatcctcctacctcagcctcctaaagtgctgtggttgcaggagtgagccaccatgcctggcctacacttttttttcttaactgaaaaataatctatgtgtattataaaaataggacaggcgcggtggctcatgcctgtaatcccagcacttggggaggctgaggcgggccgatcacttgaggtcaggagttttgagaccagcctggccaacgtggcgaaaccctgtctctactaaaaattagcgaagtgtggtgtcaggtgcctgtaatcccagccactcaggaagctgaggcacaagaatcacttgaacccaggaaggggagcttgcagtgagccgagatcacaccactgtgctccagcctgggcgacagtgagattctgtctcaacaaacaagcaaaccaaagaacaattccagtagaattgtatcagtcgtctgtgaccgaatagcaaattaccctgaaatgtagttgcttatggcaagtatttttacctgtagcagtatcagtttctgtggatcaggcgtctgaatgtggcttagtggctcttctgttgagtctcacaaaatacagtcatctcagagctccactggggtagaggccagctccatggtcacagatggcttggcagcatccagttcctcagggctgtgggccgaggccgccctcagcattgcaccacatgggcgtctccacagggcagcacacaacgtggagctgagctttcccctcactcttaatgtatttggctctttagacctgggtggctgggtccagcccacactaaaagagatgggggctataaaggcatgaactccaggacgggattgctaggggccccctaggagccacccaccctggaagcacctaaggtgacaatggggctccctgtggtgatccctgttgagagtttggggtatatcccagtaggccttttcctagcattacacataccgatctatacatacaaccacgtgtccttggcagattggaaaacagtggtgctgactcgtgtctgaggccttcaccgctgcctggccaaccaccctactttgttctccatcagcccacagggctgatcagacagacaggagaggccacgttggcgtctgtaggaaacaaggaggccgccctgcctgatgttggcgtccgtaggaagcaaggaggccgccctgcctgagaactggagcccacccatgcatgtgggtgttgtgggctgatggcctgtcctgggtcccaaaggcagacctgagagctaatctggctgctttcttttctccctaaaatactcctgtgagtgtttgctttccctcagtcttcccacagcatgtgaaccaatgctgcagggagtcaggggttatttctctcttaatcacatttgtcttacctacagaacagccctacattgtcagcaggggcacgttcccatcacggattgcgtgttaatgtttccctagaaaagatgagtcctctgttttcttggtagcaacttccctattttcattagcttacaggactcattctgaataatagcagctacttattaccacatttaaaatatagtatcagtaacatggccacatattcagcatatttcaaaacgtggatcacaggtatagcccagtatctgcattgcatatctgaccattattagccctgttttgaattcctgaagatagttcaatgcagctttaaaaaaaagaaaactctaaccagatctacattttgacgacagaaaaggcagacacaggcttctttgaaatgaagctgttgtctggaatctttctttgtaggaaactggtttagagaaagtcccacatctttttcttttttttttttgagatggagtctcgctctgtcacccaggctggagtgcagtggtgcgatcttggctcactgcaagctccttctcccaggttcaagccattctcctgccctcagcctcccgagtagctgggactacaggcacccgccaccacgcccggctaattttttgtatttttagtagagatggggtttcaccgtgttagccaggatggtcttgatctcctgacctgatgatctgcctgccttggcctcccaaagtgctaggattacaggcctgagccattgtgcctggccaaaagtcccacatctt

SEQ ID NO: 18497 - DNA, 2024 bp, Homo sapiens
  CDS (704)..(1162)
tacatgcaatgaatgtgggaaatctttctgcaggaaatcagtattgattctgcatcagggaattcactcagaagaaaaaccctatcaatgtcatcaatgtggaaatgcatttagaaggaaatcatatctcattgatcatcagaggactcacacaggagagaaaccctttgtttgcaatgaatgtggtaagtccttccgcctcaagacagccctcactgatcatcagagaacacacacaggggagaaatcgtatgaatgtctgcaatgtaggaatgccttcagattgaagtcacacctcattcgtcatcagagaactcacacgggagagaaaccatatgagtgtaatgactgtgggaagtccttccgccagaagacaacactctctctacatcagagaatccatacaggtgagaaaccctatatttgtaaagaatgtgggaagtcctttcaccagaaggcaaatcttactgtacatcagagaactcatacaggggaaaagccctatatttgtaatgaatgtgggaaatccttctcccagaagacaacccttgctcttcatgagaaaactcataatgaggagaaaccctatatttgtagtgaatgtggaaagtccttccgccagaagacaacccttgtagcacatcagagaacacatacaggggagaaatcttatgaatgtcctcactgtgggaaggcctttagaatgaagtcatacctcattgatcatcaccgaactcacacaggagagaaaccatatgaatgtaatgaatgtggtaaatcattcagtcaaaagacaaatctcaatctacatcagagaattcatacaggggagaaaccctatgtttgtaatgaatgtgggaagtcctttcgccagaaagcaaccctcactgtacatcagaaaatacataccggccagaaatcctatgaatgtcctcagtgtgggaaagcctttagcaggaagtcatatctcattcatcatcaaagaactcatacgggagagaaaccatataaatgtagtgaatgtggaaagtgcttccgccagaagacaaatcttattgtacatcagagaactcacacaggctggagtacaatggtgcgatctcggctgactgcaacctctgcctcccgggttcaagcaattctcctgcctcagcctcccaagtagctgggattacaggtacgtgccaccacacccggctaattttgtatttttagtagagaaggggtttcctatgttggccaggctggtctcacaaactcctgatctcaagtgattggcctgcctcagcctcccaaagtgctgggattacaggcatgagccactgcggttggccaagtagagcaatttttttttttttttgagacggagtctcggtctatcacccaggctggaatgcagtggcgtgatctcaactcactgcaagctccacctcctgggttcatgccattctcctgcctcagcctcccagctacttggaggctgaggcaggagaatggcgtgaatcgggaggcggagcttgcagtgagccgagatcgcgccactgctctccagcgtgggtgacagagcgagactccgtatcaaaaaaaaaaaaaaaaattgtaacaagccagtcagagaacattggaataaataaataatacttcaatgcaaagacatcaatatacatccataagcaacatgcctaaagagggaaccgtgatctcaccaaatgaacaaagcaagaaaccagtaactcatcctaacaagatggcaatatgtgagctgtctgataaaaattgaaaatagcagttctaaagaaacttagtgatttccgagataagactgaaaagcaattcagaaatgtatcaaagaaatttaacaaagaaattgaaaaaaataaaaaaacggaaatcaaatcttgcaactaaaaaatgaaatttctaaacagaattcattataggctctcaatggcagaatgggtccaatagaagaaagaatccatgagctccaaaataagttatttgaaaacacaaagtcagagggg

SEQ ID NO: 18498 - protein, 153 aa, Homo sapiens
MKSYLIDHHRTHTGEKPYECNECGKSFSQKTNLNLHQRIHTGEKPYVCNECGKSFRQKATLTVHQKIHTGQKSYECPQCGKAFSRKSYLIHHQRTHTGEKPYKCSECGKCFRQKTNLIVHQRTHTGWSTMVRSRLTATSASRVQAILLPQPPK

SEQ ID NO: 18499 - DNA, 1753 bp, Homo sapiens
cgcatttaggtctctcatctatttcaagttaatttttgtgtgtgatctgaggtccttctcattttgtactgagtcaaactgaagagccccccacctccccagttggcctgccacactttgccttctgcatttgggtctcagctcaaacatcctcactccagggaggcctcccctgtcaatctaaagcagctgcctccctgcagtttcagtcaccaccccattttattggggccgtcagaaatggtctgacatgttgtctgttgcctcccatataagctccatgacaacagaccctgtctagcttactgccttcgtttctagcacctagcgcagtgcctgacacttagccagagctcagactattatttgaaagcttcttttggttaaaagaaacattcccagtggattttgcttaagactttgtaagtgtctctggcctcatggagttggagggctgagtgggaggggatctaccagcatcacagtcacaggtggtcactcgtcccttgccccagccatcccattacttcacaagacagccccttccatccttggacaactctgatgattagaaaattcttcctgatgttggacagagacctgcttccccatcgctggcactcgttatccactgccttcctttagggacaactggagttgaacttcacattttgacagtcctttaaatatttgaaaccagctatcgtatgtctcttaaatacctcctctgggctgagtgcttctaattctctcagctgttcctcctggagccgagaagggctggactctgaccccttagtcgctgatgaaggcctgcagacatggggtgggcacaggctgccaaagaaagccccagcacagccacagctcagaacgaaggaactcgagtctccttgtttgctttccccactttgagctgatgaattccaaaactggaagcagaactttgagaaaaagcacccagtacaaactccctaactagatatcttaaaggcagagctgactcttagtagtacaaattactctgtaatattgctttctattaaaagggtgtggttttttttttgttgtttttttttttttttttagctagtccagtggtctttttgatgttggttcagcttagtggttctcaaccctggaacaacccgtagacccacctggggagctcttaaaattatcagtgcctaccccaccttccaagattctgatttaaatcctgtagtgtttttaaggcaccccaggtgattgtaatgtacagccagggttgtagaccttggcttcaagagctcagcattgaacctgaaattccctacagccccacaagaatgagcaaatgctggatgtcagcacaacatccaggagctggcatgagccagaggactggctaagaggactcaattattttctaagatggagattatgaaagctatacatgttcaaaagaaatgaaataatatagaaatgttggccaggcacggtggcccacacctgtaatcccagtactttgggaggctgaggcaggaggattgcttgaggcctagagtttgagaccagcctgggcaacatagcaagaccccatctctacaaaaaaattaaaaaattatccaagcatggtggcacatgccgatagtcccagctactggggaggctgagcggggaggacttcttgagcccaggaggtcagggctgcattgagctatgattgtgccactgcactccagcctgggcaagagagcgagactctgtctct

SEQ ID NO: 18500 - DNA, 1730 bp, Homo sapiens
aaacagtgaaacttgttgaagagtacaaattcccaagcctgtttattaaccaattttacccaagaccaggaactcctgctgcaaaaatggaacaagttccagcacaagtgaaaaagcaaaggacaaaagatctttctcgggtgtttcattcttacagtccatatgatcacaaggacttcagaaatgggcttgggaaccagctgagttcaggatcccacacctctgctgcatctcagtgtgactcagcgagttccagaatggtgctgcccatgccaaggctacatcaagactgtgcgctgaggatgtccgtgggcttggctctgctgggtcttctttttgctttttttgtcaaggtctataattagaatacaactaatggaaacatctataaagaagaatacatttctaattaaaatcttcaatgaacaggaaagcgacatctccattctccaagggcaataatttgtactggtcatgctgcctccttctcagccactcttcttaatgaggctccccctgtctcacattgagttgggcccattggttatttgacctaaaacctaatcacggctaccatagcacatccttcaaattaaactgcttttggtttacttttagcaagaaatgcaagcggttgcattttttctgtttgtttcaatctctaatctttaagtcagaacctaattgtacagtggctctggccatcttttcctcatgtggaagaattttctatctttaataaactttttctttgtttttttttttccagatggagtttcgctcttgtcccccaggctggagtggtgcagtggcacgatctcaggtcactgcaacctctgcctcctgggctcaaacgattctcctgcctcagcctcccaagtagctgggattacaggcatgcgccaccaagcccagacaatttttttgtgttttcagtagagacggagtttcaccatgttggccaggctagtctcgaactcctgacctcaagtgatccgcccgcctcggcctcccaaagtgctaggattacaggcgtgagccactgcgcccggcctctttaataaatatttttaagtgcatcttccccttcaggctttgtttggagtcccagtgctacaaacattgtatttttcacagcagatgtgttcctgaaaagtgtatagaaacctgttctgggaacctgaatgcttttggaatgcacggggagagtctgccagctaaaggactcctggcaacattctgtgaaatatgaaactggaaaactggatttgtcgaaaactaattgtgcccattttctcacatttttgatccattgggttttttttttgtttttttttttttttttttttttttgagtcaaggtctcactctgtcaccctggctggagtgcaatggcactatcttggctcactgcagccttgacctcctggactcaagcagtcctcctacctcagcctccctaatagccaggggctacaggcatataccaccatgcccaactaattttttaattttttgtagagatgagtgtcactatgttgcccaggcttgcctggaactcctagcctcaagcagtcttcttgcctcagcctcccaaagtgctgggattacaggcgtgagccactccacccagcccagattaaatgtttttatttctacctgccatcattggtctttactaagtgaagtgacttctttctttaacaataaatagaattggtatactaagc

SEQ ID NO: 18501 - DNA, 2370 bp, Homo sapiens
gtgcatcattttaggggttacatgatgttgaatatgtcttaggattggtagtgttaaccatgatcatttggttaagatactctctgctgggttttttcactgtaaaattaccgtttttcccttggtgcttaataaagattttagaagagatatactctgaaactgtgcaaataccctgtttttcttcaaactttcacccactgattttagcatccattggtgggtcttgctggcatcagttactgcttaatgtttgtctaatgttgattttctgttttcttcatttcttttacatttattgattggaaatcgtctgtagggaagatctgtaccttcctgatatatttattgatgattattaattatttatagctgtggactcattattaataaatgagggttttatgagtaatacttgtaaaccttaggagaggaatgttgatgtatttaacttgtaaactttgttttcagcttcttttgtgttaggtaggtacatgtatgcttgggtgtaggataaatagcaatgctataataatactgtatatattgttatatgaagattgcattttatttcaagatttcctttggagataacttttaaaacattgagatttcaaaccacaagatcactaattacttgcataacacttagcataattttctcctaaacgatatcatggtctttctatagttaacactcaaggtgattttctttattgttctctttgccttctttattttgaatttgaggcacttagtatatttttttataagttatagccacacatcagtacttaccagcatgataagcagttctttactataaaattaaagtttgtaaaccattaagtgtaatttttggtcagaccacaagtcctgttgcttttttatttagttgctttaaaaattttttctaaacatacagaataacaaccgttaagatctcatttttctctccacctactctctcatttgtttcttaaactcccttttttttcagcctgttttttgtatccttgttagagagaacagacatatattgtccctgaatgtacatttaattatattcttcatgtaattacattatgtaattacaactcaatcacctaatttagcactgcttaacacatgttaacttttgctttttgttcgtttttgagacagggtcttgctctattacccaggcttggagtacagtgacatgattatggctcactgcagcctcgacctcctaggcttacatcattctcccacctccaccaagtagctgggactgcaggcgcatgctgccacatccagctaattttttgtattttttatagagataaggtttcaccgtgttgcccagtttgctgtcaggcttctgggctccagcgatctgctcgcctcagcctcccaaagtgctgggattacaggtttgggccactgctctggccacatattaactttcaaccagtcatggtagctgttgttaatattttaatatataactctccagatcttttctatgcacatatactcatttttaaattgatacataatattcatactgtatgtactgttctgtatgtaacttgctttctgactttatgatatctagtttttacactctcattaaaagatgacagacatggaaccagcatggaaaacacaattaaaggaagtttaagaatcaaatgcaccagctatggtagttcacacctgtaatcccagcatttggggaggccaaggcaggaggatcgcttgagcccaggagtttgagaccagcctgggcaacatggtgaaaccctaactctccaaaaaaatataaaaattagccgggtatagtggcgtgtgcctgtagtcccatctgcttgggaggctgaggcaggaggatcacttgagcccagcaggtcaagattgcagtgagccacaatcgcgccactgtcctccaacctgggcaacagagtgagaccatatctcagaaaaataaaaagaatcaaatggattcttaaatttatggaggacttccttacaacttttttttgacctcgtgatccgcctgcctcagcctcccaaagtgctgggattacaggcatgagccaccacgcccagctgcaaatttttttattactgtactggtacgtgctttttatatatttgatctatttctttgcatcagatccctagaaatgaaatttgggggacaaatgatatacagatttttaagacttgatacgttaatgccaaaatgccttgtgtggccaggcgcggtggctcacgcctgtaatcctggcactttgggaggccgaggcaggtggatcgcttgaggtcaggagtttgaaaccagtctggccaacatggtgaaatcccatctctactaaaaatctc

SEQ ID NO: 18502 - DNA, 1316 bp, Homo sapiens
aacaaatgattgatacccacaataacctggacgaatctccacagaattatggtgagtggacgaagggtaatcccaaaggttacatgtagaattccatttaagtaacattcttgaaatgaataaattataagagtggggaatagattagtagttgccaggggttaaggagggaaggaggagcagcactgaatagaaggggtcataactataaaaaggcaacatgatgaatcccggtgttgacggaaatgttctgtaccttgcttgtataaatgtcaatctcctggtactgtggcatttgcaatatttgcaaattttatttatttattcattcattcatttttctgagacggagtcttcctctgtcgcccagactggagtgcagtggcgcgatcttggctcactgcaacctccgtctcctgggttcgcaccattctcctgcctcagcctcctgagtagctgggactagaggtgcccaccaccatacccagctaattttttatatttttagtagagacggggtttcactgtgttagccaggatggtctcgatctcctgacctcatgatccacccactttgggaggctgaggcaggcagatcgcgaagtcaggagttcaagaccatcctggccaacatgctgaaacccccgtctctactgaaaatacaaaaattagctgggcgtggtggcgcatgcctgtagtcccggctactcgggaggctgaggcaggagaatcgcttgaacctgggaggcggaggtagtggtgagccgagattgcaccattgcactccagcctgggcaacaagggcgaaaccccttctcaaaaaaataaaaaataaataaatataaggttttatgtttttggatgaaacaatatggtaaatagtaggctgggcacggtggcccacgcctgtaaccccagctctttgggaggccgaggcgggcggatcacttgaggtcagcagtttgagaccagcctggccaaaatggtgaaaccctgtctttactaataatacaaactaaagaaaaagtaagaatggccgggcgcggtggctcactcctgtaatcacagcactttgggaggccgaggcgggtggatcacctgaggttgggagttcgagaccagcctgagcaacgtggagaaaccctgtctctactaaaaatacaaaattagccggacgtggtggcgcatgcctgtaatcccagctactcaggaggctgacgcaggagaatcgcttgaacccaggaggcagaggttgtggtgagctgagatcgcaccattgcactccagcctgggcaataagaggaagctccatctcg

SEQ ID NO: 18503 - DNA, 795 bp, Homo sapiens
aaatggaatgtgcacaatgaaatgtgttccaaaatctaaaagcaaatcacaggatggagaaaacctttaatgagcacagctaataagagctcattaacattcatacatatatatgtacaaatatatcatagtaagtaccatttcttcttggatccttcctggcactgtgctaactgctttctacaaatttagcttacataaacccttgatacacccttgaggtgagtaggtattatctatagtttacataagatgaaatagagcctcccagcagttaagtaacttgtgtgaagatgggacccttgttcctgatggttctagaaccttcatccttaatgataatgctaaagtaagtacatgaattgcctgaagaagtggtcagagtttatcaatagaaaatttagatagtactcagcgtgtggaaaatgtacatttatggaaatgataatgttcactatctctgatattctatgatcttttacattagcaaaaaaaaaaaaaaaaaaaaaaaaaggccagacacagtggctcatgcctgtaatcccagcactttgggagaccgaagtgggtgaatcacctgaggtcgggagttcgagaccagcctgaccaacatgcagaaaccccgtctctactaaaaatacaaaattagacgggtgaggtggtgcatgcctgtaatcccagttacttaggaggctgaggcaggagaattgcttcaacccaggagatggaggttgcggtgaggcgagatcgtgccattgcactctagcctgggcaacaagagtgaaattctgtctc

SEQ ID NO: 18504 - DNA, 1995 bp, Homo sapiens
gacactcttgattaatgtgatccagaaccattgtgaatatccacatttgaaaatgccactattacatgtattttcacctatgaaatgtaaacatgagaatgggtcacaaaccttgctgagatacagatgctaaagagcctgctagatgtattcattaggtacaccattcacatgcgtgcacaagcctcaaagcatgttattcaaatttgtgccttagcaaaatgatgcctgctatacatcatgggtatttggagctcccacaaagagtagaaattgtaaacgttagatccctgaatgtcagtgatctactatagatgtaactattgttggtatgacacttcacacatcagttagaataatatcgcccaactttaagatctaacaatggcttgctgtaatattttattgatgatttttaaagtaagcatactatagctgaattcttctaaattttattttatattcaaatataaaataattactataaaaaacaaaatcacagaatggatccacatatatactgtcatatatgtgacaaaacattcacatatatactgtcaattgatttttgacaaaagcaccaatgcaattcaatggggaaatggaacttcaacaaatggtactagaacatctggatatctaaatgtggtgggagggaatcatgaatttttttcacatagcatacacaaaaattaatttgaaatgtgtcattgatctaaatataaaaaccaaaactatacaacatctagaccaaaacatctaagactatctttgaaagctgggggtaaagaaagatttcctaggacatagaaggcaattataagagaagacaattacaaattgaactttatcaaaattttaaaagtctgctcatgttagtgttaagacaaaaaggcaagccatggacaggaaaaaatatttgtaatatgtttatctgacaaaggactcgtatccaaaatatatacatataaaaaaacacaatattaaaaaatgggcaaaagccttgaacagatactacaaaagaaaatattggaatgtccaataacacataaagagatgttcatatgaaggtaaaatgaagcaggcaaaaaaagaaaagatgttcaacatcattagttatgagagaaatgcaatataaagtcatgaagtaatactttcacatctatcagaatgactaaaatttaaaagactgataaaatgtcaataagaatgtgaaagtcagaactttcatacactgctgctaagattacaaaatggtacaaccactttggaaaactggcaatttctgatacaattaaatatatccttcaacctgtgatccagcaatcctactccagggtatatacccaagagaagtgaaatcatatgtccacaagaagagttgagcatgaatatcatagcagttctatttataatagccccaaactagaaacaatcccaatgtccttcaataggtaaatagataagtaagttacaatacagtggtattcagcaataaaaagacctactgatacaagcaaaacatgaatgaaaccaaaaatatgacatataaacaagtacttactgaatgattccatttatgtgaagttcaagaaaaggcaaaaagtgatctgtggtggtagaaatgaaaacactgtttgcctcaggtggtcaggtgagacattcattaactagaaaggagaacttcctggagtgaaagaagatacgttttgatggccaggcgcagtggctcatgcctgtaatcccaacactttgggaggctgaggagggcggatcacgaggtcaggagttcgagaccagcctggccagcatggtgaaaccccatctctactaaaaatacaaaaaattggctggacatggtggcacacacctgtagtcccagctacttgggaggctgaggcaggagaatcgcttgaacccaggaggtggaggttgcagtgagcctatatcacgccactgcactccagcctagatgacagagcaagactctgtctc

SEQ ID NO: 18505 - DNA, 1656 bp, Homo sapiens
  CDS (854)..(1195)
gaaaaatgatgctctccccacttctctcccttccgtaagtatttcctaagtgcctactatgtaccagataccattctaggtgcaggggacatgtctgtaaacaaaacaaagtcctttctcttaaggaggttactttctagtagagacagacaaataaattaataaagagaggctctatcagaggtgaaagttctctgcagaaaatcaaagcagggggccaggtgtggtggctcacgcctgtaattccaacactttgggaggccgaggtgggcggatcatgaggtcaggagttcaagaccagcctgaccaacatggtgaagccccgtctctgctaaaaatacaaaaattagccaggcatagtggcatgtacttgtaattccagccactagggaggctgaggcaggggactcacttgaacccagcaggtggaggttgcagtgagctgagatcgcgctactgcactccagcctgggaaacagagcaagactctgtctcaaaacaaaacaaacaaacaacaaacaaacaaacaaaaatcaaagcaaagcaaggtaaggagatatgaagatctccaggaaggagaagtggtcagaaacagaatgagtcaggaaaggtcagggtaataaggtgttgtctgagtaaaggcctttgtagtgaaaggggagcagatagatacctacgtaaggaatgcccctggcagagaaaagagcagggacaaaggccctgtgcaggaagaatatcaaggggccagagtggcagaagcccagggaggtgggctgaggtgcagaaggtacgggcggagtggaaggctgagcaccagatcacacttggggccctggggttgggtttattctgaatgaggtttgaagtcaaagcagagatactatctggaagaacttgctccagcatgttttcaaaggacctttatctccaagaaaaaaagaaatcgtatttgtcacatgacatacctttatataaaattatgtatacagtttcttttataatacacattgatggttttaggcaaaattatctatgtaatagttcccttgacaaaggtaacactcaactcggtttttctcaaagtagctgtggaacagatggctgccccagggctttccttcatgttaaaagaacaacagtaactacatgtaatcaaattaaaaataaagcaaatgcacatataatgacactaaaataaaataaatgcctctaattataggtgtgtatgtgattcctatgtctctgggctattctttatcagaactaagaatgaactctggctgctgggtttattccaaagcactatccctcccaaaaaggtctcaaagtcagtttggccaagggcagtgaactttcatattaaaaagagaaaaaggccgggtgtggtggctcatgcctgtaatcccagcactttgggaggtgaggtgggcagatcacctgaggtcaggagttgaagaccagcctggccaacttggtgaaacctgtctctactaaaaatacaaaaaagtagccagacatggtgatgggcacccgtgatcccagctactcaggaggctgaggcaggagaactgcttggatccaggaggcagaggttgcagtgagcctagatcatgccattgcattcctgcctgggcaacaagagtgaaactccatctc

SEQ ID NO: 18506 - protein, 114 aa, Homo sapiens
MRFEVKAEILSGRTCSSMFSKDLYLQEKKKSYLSHDIPLYKIMYTVSFIIHIDGFRQNYLCNSSLDKGNTQLGFSQSSCGTDGCPRAFLHVKRTTVTTCNQIKNKANAHIMTLK

SEQ ID NO: 18507 - DNA, 2006 bp, Homo sapiens
  CDS (95)..(445)
ttgctacatcaaagagagagatccttttgtttgtttgttcgtttgttttttgagactgagtttcgctctttcgcccaggctggagtgcattggcatgatctcggctcactgcaacctctgccttctggtttcgggcgactcttctgcctcggcatcccgagtagctgggatgacaggtgccagccaccatgcccagctaatttgtgtatttctagtggagatggggtttcaccatgttggccaggctggtcttgaactcctgacctcatgtgatccgcccgcctcggcctcccaaagtgctgggattacaggcttgagccaccacgcccagcctgtagcatattttaataggagaatacaatatataatagtagcagggttaagtaaggcatccatcatctgtagcatttctcctttgttttacaaacaatccaattctacactttaaaaaaaaatttttaaatgtacaattaaatttttatttaccacagtgttatttttatcgtcataataaaaattatatacgagtataaatgaaattcatttctaaattcttaataaatattttctcatgccaggtgtggtggctcacgtctgtgatcccagcactttgacaggctgagcgagggagtggatcttgaggtcagcagttcgagaccagcgtggccaatgtggagaaatcccgtctctactaaaaatacaaaaattagccaggcgtggtggcatgtgcctgtaatcccagctactcgggaggctgaggcaggagaatcgcttgaacctgggaggtggaggttgcagtgagccaagatcaccccactgcactccagcctgggcaacagagcgagactccatctcaaaaagtaaaatatattttcaaattttctatatatttttctttgaacatgtggcctgtctgcctgcaaacatatacagacttttagttttgattcatatagagttaaatacatgttagtctaaagacaaatcttaggtgtaagaaaattatggagttaagtatgtgtgtgtgagtatgagtttgtacatattttcagaaggaaagaatgatacgggaacaaaaatcattttaatatggtgactactataaaactaaaaacctaaaaaatgctgaaagcaaatgtatactttttggtttgtattgaatttattactgtacagtctatgacttagagttctgaatcttcccaagcaaattctctgtatatacttgcctggtactcatgctagacccatactttttttgtttcttacattttttttgttttatattttatgaagtattcattatgtgagctggtctgcgattataagaatttttatgaaatttagtgcacacaaaataatctttagatgtaattccaaaagtagtgtattaagttacattttatttagttagagcactccattttgttcttttaagaggagaacaatatataggttttctttagtgatttgttcctttcactttttataattgacataagcatatttattgagtcaatttgttcagctaagtactagggaggcttcattagtcatgaggatgtttttatatataaatgtagcaaacatatattacagttttcactgtgtaatagattatccataataattcataaatattcctgctgaagttagtttgtaacttcaagtcaaagatgaaaaatatcaatggtgaagattgattgttcatatagagaggacattttttttccagactgtaaaactgaatcttgttgaatttaaagagaaattctggcagaggcggatgaatcacctgaggtcaggagtttgagaccagcctgatgaatatggtgaaacccagtctctactaaaactacaaaaatagccaggcatggtggtgggtgcctgtaatcccactcgggaggcggagtcaggagaattgcttgaacccggaggtgaagattggagtaagccaagattgtgccgttgcactacagcctgggcgacagagcgagactccatat

SEQ ID NO: 18508 - protein, 117 aa, Homo sapiens [sequence omitted]

SEQ ID NO: 18509 - DNA, 2264 bp, Homo sapiens
  CDS (604)..(1254)
aaaatgagaaacccctacacagggctctatgtcccctcgccctctccagtcaaggccaccacaagccaagggaggtctgggcgtgagaggtgagaccctgtgctccccctgccctgggtggaggaagggggtgccctgccaccctgagaacaatggtgtgtgcagaagagaagggactgaaactctttgaagatgttccaggatttagcacccagggagcggcggagactcagccccaccagcctccggcacggagggaggaaagcgttccccaggctgctcaggagaacgtttgttgctgtagtgggcagtcaccttccaaccggggacagtcacccccctgctcggggacagtcacccccccgctcggggacagtcacccccccgctcgggcacagtcacccccctgctcggggacagtcatccccccgctcggggacagtcaccctcccggaatggggcttcctttctcggggctgggaatcaccctggatccctccccactcggggtgctcttgggccatctgagggctcctgggtcactcttgggccttctcagggttcctgggtcattcttgggccatctgagggttcctgagcccaatgacacttctgcctaggctcgcgctgcgggaggaagaagccaggcgaggtcccctccgtgccccggtgcagcctggcctgggagagaggagcccccagcgacaccgagagccaaaacagggcagagtttctcagaggtggcacccggccagggagcccctcgcggctacagggtttctccacggactcggccatctggggagagcagcccagagccctcgagcctcctgctgtattctgtggcctgggacttggggggacccattgaggacactgggacgcagccaaagggaggtgcagacagtgtgtactggcgtttccggggaccaagcccagaaggagcaggacggccacctcctggcctggaggaaaatcctgcttcctggcaagaaaaccacccctagaggaataggactggggtgcaggacgctttctcaggcaaccgcccctttccttctccaaaactggggcaggaaaagagcattcaggccaggcagcgaaaaccccagctctggtacctcccgccccagcagaggccgcctggaggcacggagttccggcctggatgaggcctgggaagcccagcgactcacaggccacggccgcttcccctctccgaggaaggaaaagtccctgcagcgcggcctcggctaaggctccggtgcccaagcaaaggaagggagcgtgcttgcagacgcctcctgctgggagcctgccacgcccgccacaccctgcgcggggacaaagctctccgtggctgtggcagggacacaccgcgtgtgggtggctgcaagccagcagccccgagcggcccctcccgctagactcccagcctgggccctctgtcctccaggcaacgagaacatggatgcctcgcttttcagagactcgcgttcttggaacttacaccctcttgggtttgctatttttacccaccctgagccttccggtctccatggcgacgcctccaaacagcagattccaggcggcaatgacgtcatctctccctttcctgccgcccaggccttggaggtactgctgcctggggccgggggtgggggtgggggggctgcagggcttccctggccccctcccatacccacctggtgctcccccaaccagagatccaaggcctgtgggccacggctgcgcctctcctgactccagcttgcccgtctgtccttgggggcagcgtccttccttctctcggccccttggagcagctctgcgggaaccccacagcagcccagcggattgaacgcaaaagacagccaccctcctgctccggatcctgggaggaggctacacgctggcgctgagacagcaacctgcctggcctgggaagccccccgcagcccctacatcagaagcttgctcttggcgcagtggctcacgcctgtaatcccagcactttgggaggctgaggcgggcggatcacgaggtcaggagatcgagaccaacctggctaacacggtgaaaccctgtcgctcctaaaaatacaaaaaaaacaaattagctgggcgtggtggcgggcgcctgtagtcccagctactcgggaggctgaggcaggagaatggtgtgaacctgggaggtggagcttgcagtgagccgagatcacactactgcactccagcctgggcgacaaagcaagactccgtctc

SEQ ID NO: 18510 - protein, 217 aa, Homo sapiens
MTLLPRLALREEEARRGPLRAPVQPGLGERSPQRHREPKQGRVSQRWHPAREPLAATGFLHGLGHLGRAAQSPRASCCILWPGTWGDPLRTLGRSQREVQTVCTGVSGDQAQKEQDGHLLAWRKILLPGKKTTPRGIGLGCRTLSQATAPFLLQNWGRKRAFRPGSENPSSGTSRPSRGRLEARSSGLDEAWEAQRLTGHGRFPSPRKEKSLQRGLG

SEQ ID NO: 18511 - DNA, 2824 bp, Homo sapiens
  CDS (191)..(619)
ctggctggaccactggctacagcaccgcaagcagatcgggctgctcagcttcttctgcgccgccctgcacgccctctacagcttctgcttgccgctgcgccgcgcccaccgctacgacctggtcaacctggcagtcaagcaggtcttggccaacaagagccacctctgggtggaggaggaggtctggcggatggagatctacctctccctgggagtgctggccctcggcacgttgtccctgctggccgtgacctcactgccgtccattgcaaactcgctcaactggagggagttcagcttcgttcagtcctcactgggctttgtggccctcgtgctgagcacactgcacacgctcacctacggctggacccgcgccttcgaggagagccgctacaagttctacctgcctcccaccttcacgctcacgctgctggtgccctgcgtcgtcatcctggccaaagccctgtttctcctgccctgcatcagccgcagactcgccaggatccggagaggctgggagagggagagcaccatcaagttcacgctgcccacagaccacgccctgagcccgttaggttttcttttcttggtggtgcaaagtggtataactgtgtgcaaataggaggtttgaggtccaaattcctgggactcaaatgtatgcagtactattcagaatgatatacacacatatgtgtatatgtatttacatatattccacatatataacaggatttgcaattatacatagctagctaaaaagttgggtctctgagatttcaacttgtagatttaaaaacaagtgccgtacgttaagagaagagcagatcatgctattgtgacatttgcagagatatacacacactttttgtacagaagaggcttgtgctgtggtgggttcgatttatccctgcccaccccacccccacaacttcccttttgctacttccccaaggctcttgcagagctagggctctgaaggggagggaaggcaacggctctgcccagagccatccctggagcatgtgagcagcggctggtctcttccctccacctggggcagcagcaggaggcctggggaggaggaaaatcaggcagtcggcctggagtctgtgcctggtcctttgcccggtggtgggaggatggagggattgggctgaagctgctccacctcatccttgctgagtgggggagacattttccctgaaagtcagaagtcaccatagagcctgcaaatggatcctcctgtgagagtgacgtcacctcctttccagagccattagtgagcctggcttgggaacaagtgtaatttccttccctcctttaacctggcgatgagcgtcctttaaaccactgtgccttctcaccctttccatcttcagtttgaacgactcccaggaaggcctagagcagaccctttagaaatcagcccaagggggagagcaagagaaaacactctagggagtaaagctccccgggcgtcagagttgagccctgcctgggctgaaggactgtcttcaagaagtcagtcctgaggaaaaatattggggactccaaatgtcctctggcagaggacccagaaaaccacactggctccaacttcctcctcatggggcattacacttcaaaacagtggggagcaacttttccaccaaagctacaaacctaaaatgctgctgccccaaagcacaagagggaagagcaccgccggggccacaggacgtctgtcctccagtcacaggccatccttgctgctccctactgactctagcttacttcccctgtgaagaaacaggtgttctcggctgagcccccaaccctctgcagaaccaggttgatctgccacagaaaaagcatctttgaagacaaagagggtgaggtcttcatgagtctcctgggcccaaagccatcttctgatggaaggaagagagtagggccagtgaaggctgcccagagagaatgtcacagatgaggctgcccctgccaccccccccagggaggtttcatgagctcatgtctatgcagcacataagggttcttcagtgaaaagcaggagaagagcccactgcaaggatagctcattaggcacatgaccgatgcagggaaggccatgccggggaagctcttcctgcaggtattttccatctgctgtgccaaggctgagcggcagaaacttgtctcataaattggcactgatggagcatcagctgtggcccacagagagccttgctgagaagggggcaggtaaagcagagattttagcattgccttggcataacaagggcccatcgattccctactaatgagaggcagggagagcatgggcaatggagacccaccaatgatccccaaccccggtgggtactggctgcctgccctgggccagggaatggctccttataccaaagatgctggcacatagcagaacccagtgcacgtcctccccttcccacccacctctggctgaaggtgctcaagagggaagcaattataaggtgggtggcaggagggaacaggtgccacctgctggacaatcacacgaaaggcaggcgggctgtgtactgggccctgactgtgcgtccactgctgtcttccctacctcaccaggctactggcagcagcatcccgagagcacatcatctccacagcctggtaaattccatgtgcctctgggtacaaaagtgcctcaacgacatgctctggaaatcccaaatgccacagtctgaggttgatatctaaaatctatgccttcaaaagagtctctgttttttttttttaacctggtagacggtataaaagcagtgcaaataaacacctaaccttctgc

SEQ ID NO: 18512 - protein, 143 aa, Homo sapiens
MEIYLSLGVLALGTLSLLAVTSLPSIANSLNWREFSFVQSSLGFVALVLSTLHTLTYGWTRAFEESRYKFYLPPTFTLTLLVPCVVILAKALFLLPCISRRLARIRRGWERESTIKFTLPTDHALSPLGFLFLVVQSGITVCK

SEQ ID NO: 18513 - DNA, 3226 bp, Homo sapiens
  CDS (44)..(2869)
gtgtcccgccgggtccccgagcgtcccgcgccctcgccccgccatgctcctgctgctggggctgtgcctggggctgtccctgtgtgtggggtcgcaggaagaggcgcagagctggggccactcttcggagcaggatggactcagggtcccgaggcaagtcagactgttgcagaggctgaaaaccaaacctttgatgacagaattctcagtgaagtctaccatcatttcccgttatgccttcactacggtttcctgcagaatgctgaacagagcttctgaagaccaggacattgagttccagatgcagattccagctgcagctttcatcaccaacttcactatgcttattggagacaaggtgtatcagggcgaaattacagagagagaaaagaagagtggtgatagggtaaaagagaaaaggaataaaaccacagaagaaaatggagagaaggggactgaaatattcagagcttctgcagtgattcccagcaaggacaaagccgcctttttcctgagttatgaggagcttctgcagaggcgcctgggcaagtacgagcacagcatcagcgtgcggccccagcagctgtccgggaggctgagcgtgggcgtgaatatcctggagagcgcgggcatcgcatccctggaggtgctgccgcttcacaacagcaggcagaggggcagtgggcgcggggaagatgattctgggcctcccccatctactgtcattaaccaaaatgaaacatttgccaacataatttttaaacctactgtagtacaacaagccaggattgcccagaatggaattttgggagactttatcattagatatgacgtcaatagagaacagagcattggggacatccaggttctaaatggctattttgtgcactactttgctcctaaagaccttcctcctttacccaagaatgtggtattcgtgcttgacagcagtgcttctatggtgggaaccaaactccggcagaccaaggatgccctcttcacaattctccatgacctccgaccccaggaccgtttcagtatcattggatttcccaaccggatcaaagtatggaaggaccacttgatatcagtcactccagacagcatcagggatgggaaagtgtacattcaccatatgtcacccactggaggcacagacatcaacggggccctgcagagggccatcaggctcctcaacaagtacgtggcccacagtggcattggagaccggagcgtgtccctcatcgtcttcctgacggatgggaagcccacggtcggggagacgcacaccctcaagatcctcaacaacacccgagaggccgcccgaggccaagtctgcatcttcaccattggcatcggcaacgacgtggacttcaggctgctggagaaactgtcgctggagaactgtggcctcacacggcgcgtgcacgaggaggaggacgcaggctcgcagctcatcgggttctacgatgaaatcaggaccccgctcctctctgacatccgcatcgattatccccccagctcagtggtgcaggccaccaagaccctgttccccaactacttcaacggctcggagatcatcattgcggggaagctggtggacaggaagctggatcacctgcacgtggaggtcaccgccagcaacagtaagaaattcatcatcctgaagacagatgtgcctgtgcggcctcagaaggcagggaaagatgtcacaggaagccccaggcctggaggcgatggagagggggaccccaaccacatcgagcgtctctggagctacctcaccacaaaggagctgctgagctcctggctgcaaagtgacgatgaaccggagaaggagcggctgcggcagcgggcccaggccctggctgtgagctaccgcttcctcactcccttcacctccatgaagctgagggggccggtcccacgcatggacggcctggaggaggcccacggcatgtcggctgccatgggacccgaaccggtggtgcagagcgtgcgaggagctggcacgcagccaggacctttgctcaagaagccataccagccaagaattaaaatctctaaaacatcagtggatggtgatccccactttgttgtggatttccccctgagcagactcaccgtgtgcttcaacattgatgggcagcccggggacatcctcaggctggtctctgatcacagggactctggtgtcacagtgaacggagagttaattggggcacccgcccctccaaatggccacaagaaacagcgcacttacttgcgcactatcaccatcctcatcaacaagccagagagatcttatctcgagatcacaccgagcagagtcatcttggatggtggggacagactggtgctcccctgcaaccagagtgtggtggtggggagctgggggctggaggtgtccgtgtctgccaacgccaatgtcaccgtcaccatccagggctccatagcctttgtcatcctcatccacctctacaaaaagccggcgcccttccagcgacaccacctgggtttctacattgccaacagcgagggcctttccagcaactgccacggactgctgggtcagttcctgaatcaggatgccagactcacagaagaccctgcagggcccagccagaacctcactcaccctctgctccttcaggtgggagaggggcctgaggccgtcctaacagtgaaaggccaccaagtcccagtggtctggaagcaaaggaagatttacaacggggaagagcagatagactgctggtttgccaggaacaatgccgccaaactgattgacggggagtacaaggattacctggcatcccatccatttgacacagggatgacacttggccagggaatgtccagggagctctgaagctggcagccttaaagatgcaagtgcatgaaggacagtgatgtggggaggccgtggggcagctcttttcatggcttgtacacgcctcagctcctggcaattagctggactccatgacccacccctggtgcagcatagatccgacgtctgtctgggcgaagggtaggggtgggtaggggcgggaagcctgagtgcaaatgtcatttccctctactgcctcttcctgcctctccccaccctgcccacatccacagaggggagagaagggtcatagctaaatgcaacaaagtctgtatcttgtcccaacctgcttttctgttctgttagcatatcataaagtaagcctttctggtg

SEQ ID NO: 18514 - protein, 942 aa, Homo sapiens
MLLLLGLCLGLSLCVGSQEEAQSWGHSSEQDGLRVPRQVRLLQRLKTKPLMTEFSVKSTIISRYAFTTVSCRMLNRASEDQDIEFQMQIPAAAFITNFTMLIGDKVYQGEITEREKKSGDRVKEKRNKTTEENGEKGTEIFRASAVIPSKDKAAFFLSYEELLQRRLGKYEHSISVRPQQLSGRLSVGVNILESAGIASLEVLPLHNSRQRGSGRGEDDSGPPPSTVINQNETFANIIFKPTVVQQARIAQNGILGDFIIRYDVNREQSIGDIQVLNGYFVHYFAPKDLPPLPKNVVFVLDSSASMVGTKLRQTKDALFTILHDLRPQDRFSIIGFPNRIKVWKDHLISVTPDSIRDGKVYIHHMSPTGGTDINGALQRAIRLLNKYVAHSGIGDRSVSLIVFLTDGKPTVGETHTLKILNNTREAARGQVCIFTIGIGNDVDFRLLEKLSLENCGLTRRVHEEEDAGSQLIGFYDEIRTPLLSDIRIDYPPSSVVQATKTLFPNYFNGSEIIIAGKLVDRKLDHLHVEVTASNSKKFIILKTDVPVRPQKAGKDVTGSPRPGGDGEGDPNHIERLWSYLTTKELLSSWLQSDDEPEKERLRQRAQALAVSYRFLTPFTSMKLRGPVPRMDGLEEAHGMSAAMGPEPVVQSVRGAGTQPGPLLKKPYQPRIKISKTSVDGDPHFVVDFPLSRLTVCFNIDGQPGDILRLVSDHRDSGVTVNGELIGAPAPPNGHKKQRTYLRTITILINKPERSYLEITPSRVILDGGDRLVLPCNQSVVVGSWGLEVSVSANANVTVTIQGSIAFVILIHLYKKPAPFQRHHLGFYIANSEGLSSNCHGLLGQFLNQDARLTEDPAGPSQNLTHPLLLQVGEGPEAVLTVKGHQVPVVWKQRKIYNGEEQIDCWFARNNAAKLIDGEYKDYLASHPFDTGMTLGQGMSREL

SEQ ID NO: 18515 - DNA, 2502 bp, Homo sapiens
  CDS (76)..(621)
ctctttggccaagccctgcctctgtacagcctcgagtggacagccagaggctgcagctggagcccagagcccaagatggagccccagctggggcctgaggctgccgccctccgccctggctggctggccctgctgctgtgggtctcagccctgagctgttctttctccttgccagcttcttccctttcttctctggtgccccaagtcagaaccagctacaattttggaaggactttcctcggtcttgataaatgcaatgcctgcatcgggacatctatttgcaagaagttctttaaagaagaaataagatctgacaactggctggcttcccaccttggactgcctcccgattccttgctttcttatcctgcaaattactcagatgattccaaaatctggcgccctgtggagatctttagactggtcagcaaatatcaaaacgagatctcagacaggaaaatctgtgcctctgcatcagccccaaagacctgcagcattgagcgtgtcctgcggaaaacagagaggttccagaaatggctgcaggccaagcgcctcacgccggacctggtgcaggactgtcaccagggccagagagaactaaagttcctgtgtatgctgagataacaccagtgaaaaagcctggcatggagcccagcactgagaacttccagaaagtgttagccttctcccaactgtgttataccaaccacattttcaaatagtaatcattaaagaggcttctgcatcaaaccttcacatgcagctcccatgccaccctccagaattcaccaacacacaggcccaccagcaacaggctacctttgcacaatattctctgatgacaactccaaagccccggctctttccaccacactgtggtcccctagatggggctgttgctgagcccaccccaatccagatgtgatccccctgtgatctacttctggcaagattctcagtctggacaggtcttccctatgagatagaacctgataaggagctagggcaattctgacaacattaccaaaggcccacataacttctaaattttggtctggtctgaaggaaaacctgttctcgccctagtgatggatgaactctcttatctctggcttctagagggaaaaaaaaagcatacctcttttactttttaagtacctccatcagagtcatgaaatcacctgtcaagactatctatcttttatgtttccattctggtaagaactctttaaatgaggacactgctgattgctggtgatgttttttgagcaaacactcgggggtatggatgaaagccaatcgcaggtcaaatgactccttggggaagctacttctcctctattcagatttcactaaaatcttccaagatgaaagcaaatctagatttcggtcttcattgctgtccatttttgtaatgaacgagtgtttttcctttagctagtgtatcaggcagggttctaccagagaaacagaaccagtaggagatacatatacatgtccagatttatttcaaagaattgatttacatgattgtggggattggcaagtccaaaatccatatggtaggcctgcaatctgtaaacctttgggcaggagctgatgctgtagtttgcagatagaattccttgttccttaaaaaaatctgtttttgttcttaagggctttgaatgattggatcaggcccacccagattacctagataatctcttttacttaaagtaaactgattgtaggtgctaatcacatctatgaaatgccttcacagcaacacctagattagcattcaattgaataactggggaatacagcctagccaagttgacacataaaattaaccatcacagcaacatgcctgctaaattttatcgaccgtcttcagactgttaaggattgtggtagagaactgtgacagccactctcagcatcaccctgaaccaaaggcccctatcaagtaacaatatagccaagcaaaattccagtcaatagagacattgactggttggctggcttcccaagggatagcaccagacaagaaatgcaaggatgaggaaaccaggcacgggagagggaggggcaacagaggtccagggtttggttatctttttatttttcactgggaggtggtaagttagccctgttgcccatgtatgcagatgggagaagtgatttagaaactccaaagcaattggtaatccccaaaatgggtgtatctggtttgaaatgaaaccttattttattggaaatggttggtttcccaattctgtttgccattggccaatataattgtgggtttgcacatggccagcacatgccaaacagaagtagacaaaggtctcactctgtaagtgggaccttggggaggagctgcctccatcataaagggaggggttagtaaaaatggtctcttaagcctgttcctgctacagttatagaggttgctcagaaccttctcagcaaatatagcagttatctattgttgtgtattaaaccatttcaacacat

SEQ ID NO: 18516 - protein, 182 aa, Homo sapiens
MEPQLGPEAAALRPGWLALLLWVSALSCSFSLPASSLSSLVPQVRTSYNFGRTFLGLDKCNACIGTSICKKFFKEEIRSDNWLASHLGLPPDSLLSYPANYSDDSKIWRPVEIFRLVSKYQNEISDRKICASASAPKTCSIERVLRKTERFQKWLQAKRLTPDLVQDCHQGQRELKFLCMLR

SEQ ID NO: 18517 - DNA, 1605 bp, Homo sapiens
  CDS (77)..(1558)
tctgagagaggagccttagccctggattccaaggcctatccacttggtgatcagcactgagcaccgaggattcaccatggaactggggctccgctgggttttccttgttgcttttttagaaggtgtccagtgtgaggtgcaactggtggagtctgggggaggcctggtcaagccgggggggtccctgagactctcctgtgcagcctctggattaagcttcagtacctatgccatgaactgggtccgccaggctccagggaaggggctggaatgggtctcaagtattagtagtagaagtgattacatatactatagagactcagtgaagggccgattcaccatctccagagacaacgccaagaattcactgtatctgcaaatgaatagcctgagagtcgacgacacggctgtctattactgtgcgagagattcttgtaatggtgctatatgttatggtttcagtccctggggccagggaaccctggtcaccgtctcctcagcatccccgaccagccccaaggtcttcccgctgagcctctgcagcacccagccagatgggaacgtggtcatcgcctgcctggtccagggcttcttcccccaggagccactcagtgtgacctggagcgaaagcggacagggcgtgaccgccagaaacttcccacccagccaggatgcctccggggacctgtacaccacgagcagccagctgaccctgccggccacacagtgcctagccggcaagtccgtgacatgccacgtgaagcactacacgaatcccagccaggatgtgactgtgccctgcccagttccctcaactccacctaccccatctccctcaactccacctaccccatctccctcatgctgccacccccgactgtcactgcaccgaccggccctcgaggacctgctcttaggttcagaagcgaacctcacgtgcacactgaccggcctgagagatgcctcgggtgtcaccttcacctggacgccctcaagtgggaagagcgctgttcaaggaccacctgagcgtgacctctgtggctgctacagcgtgtccagtgtcctgccgggctgtgccgagccatggaaccatgggaagaccttcacttgcactgctgcctaccccgagtccaagaccccgctaaccgccaccctctcaaaatccggaaacacattccggcccgaggtccacctgctgccgccgccgtcggaggagctggccctgaacgagctggtgacgctgacgtgcctggcacgtggcttcagccccaaggacgtgctggttcgctggctgcaggggtcacaggagctgccccgcgagaagtacctgacttgggcatcccggcaggagcccagccagggcaccaccaccttcgctgtgaccagcatactgcgcgtggcagccgaggactggaagaagggggacaccttctcctgcatggtgggccacgaggccctgccgctggccttcacacagaagaccatcgaccgcttggcgggtaaacccacccatgtcaatgtgtctgttgtcatggcggaggtggacggcacctgctactgagccgcccgcctgtccccacccctgaataaactccatgctccccc

SEQ ID NO: 18518 - protein, 494 aa, Homo sapiens [sequence omitted]

SEQ ID NO: 18519 - DNA, 2666 bp, Homo sapiens
  CDS (32)..(2293)
cccggcgctcggagcccgagtccgcgggaagatggcggcgccgctcatccccctctcccagcagattcccactggaaattcgttgtatgaatcttattacaagcaggtcgatccggcatacacagggagggtgggggcgagtgaagctgcgctttttctaaagaagtctggcctctcggacattatccttgggaagatatgggacttggccgatccagaaggtaaagggttcttggacaaacagggtttctatgttgcactgagactggtggcctgtgcacagagtggccatgaagttaccttgagcaatctgaatttgagcatgccaccgcctaaatttcacgacaccagcagccctctgatggtcacaccgccttctgcagaggcccactgggctgtgagggtggaagaaaaggccaaatttgatgggatttttgaaagcctcttgcccatcaatggtttgctctctggagacaaagtcaagccagtcctcatgaactcaaagctgcctcttgatgtcctgggcagggtctgggacctcagtgacattgacaaggatgggcacttggatcgagatgagttcgccgtggccatgcacttggtgtaccgagccctggagaaggagcccgtgccctccgccctgcccccgtccctcatcccaccctccaagagaaagaagactgtgttccctggcgccgtccccgtcctgcctgccagccccccaccaaaagacagcctccgctccacgccgtcccacggcagcgtcagcagcctcaacagcacagggagcctgtcccccaagcacagcctcaagcaaacacagccaacagtgaactgggtggtgcccgtggcagacaagatgcgatttgatgagatattcctgaagaccgacctggacctggatggctacgtgagtggccaggaggtgaaggagatcttcatgcactcgggcctcacccagaaccttctagcacacatatgggccctggccgatacgaggcaaacggggaagttaagcaaagaccaattcgcgttagctatgtatttcattcagcagaaggtcagtaaaggcatcgaccctcctcaagtcctctcgccggacatggtcccgccttcggagagaggcacgcccggcccggacagttcaggctctctcggctccggggagtttactggcgtgaaggagcttgatgacatcagtcaagagattgcccagttacaaagagagaaatattcactggaacaagacattcgagaaaaggaagaggcaatcagacagaaaaccagcgaggtgcaggaattacaaaatgacctagaccgggaaacaagcagtttgcaggagctcgaggctcagaaacaggatgctcaagaccgcctggacgagatggaccagcagaaggccaagctccgagacatgctgagcgacgtccggcagaagtgccaggatgagactcagatgatctcatcactgaaaacgcaaatccaatctcaggaatctgacttaaagtcccaggaagacgatctgaaccgagccaagtcggagctgaaccgattgcagcaggaggaaacccagctggagcagagcattcaggctgggcgagtccagctggaaaccatcatcaagtccctgaagtcaacgcaagacgaaatcaaccaggcaaggagcaaactttcccagctgcatgaaagccgccaggaggcccacaggagcctggagcagtatgaccaggtgctcgatggagcccatggtgccagcctgaccgacctggccaacctgagcgaaggcgtctccctggcagagaggggcagttttggagccatggatgatcctttcaaaaataaagccttgttatttagcaacaacacgcaagagttgcatccggatcctttccagacagaagaccccttcaaatctgacccatttaaaggagctgaccccttcaaaggcgacccgttccagaatgacccctttgcagaacagcagacaacttcaacagatccatttggaggggaccctttcaaagaaagtgacccattccgtggctctgccactgacgacttcttcaagaaacagacaaagaatgacccatttacctcggatccattcacgaaaaacccttccttaccttcgaagctcgacccctttgaatccagtgatcccttttcatcctccagtgtctcctcaaaaggatcagatccctttggaaccttagatcccttcggaagtgggtccttcaatagtgctgaaggctttgccgacttcagccagatgtccaaggtaaaagtacacctgtaagccagcttggttccgcagactttcccgaggcccccgatccactccagccactcggggctgacagcggcgacccgttccaaagtaaaaaggggtttggggacccgtttagtggaaaagacccatttgtcccctcctctgcagctaaaccttctaaggcctctgcctcgggctttgcagacttcacctctgtaagttgagtcctccgcctccgggccaccccactcccttccgcttgcagcttccctgggatttttgtctccttttaaaggcaaacctcccagcttctttagcctcttggtacctcacactctctgtccctcgcgttatttattctacactgccacttctgtaagaaaaacagtttctcaat

SEQ ID NO: 18520 - protein, 754 aa, Homo sapiens
MAAPLIPLSQQIPTGNSLYESYYKQVDPAYTGRVGASEAALFLKKSGLSDIILGKIWDLADPEGKGFLDKQGFYVALRLVACAQSGHEVTLSNLNLSMPPPKFHDTSSPLMVTPPSAEAHWAVRVEEKAKFDGIFESLLPINGLLSGDKVKPVLMNSKLPLDVLGRVWDLSDIDKDGHLDRDEFAVAMHLVYRALEKEPVPSALPPSLIPPSKRKKTVFPGAVPVLPASPPPKDSLRSTPSHGSVSSLNSTGSLSPKHSLKQTQPTVNWVVPVADKMRFDEIFLKTDLDLDGYVSGQEVKEIFMHSGLTQNLLAHIWALADTRQTGKLSKDQFALAMYFIQQKVSKGIDPPQVLSPDMVPPSERGTPGPDSSGSLGSGEFTGVKELDDISQEIAQLQREKYSLEQDIREKEEAIRQKTSEVQELQNDLDRETSSLQELEAQKQDAQDRLDEMDQQKAKLRDMLSDVRQKCQDETQMISSLKTQIQSQESDLKSQEDDLNRAKSELNRLQQEETQLEQSIQAGRVQLETIIKSLKSTQDEINQARSKLSQLHESRQEAHRSLEQYDQVLDGAHGASLTDLANLSEGVSLAERGSFGAMDDPFKNKALLFSNNTQELHPDPFQTEDPFKSDPFKGADPFKGDPFQNDPFAEQQTTSTDPFGGDPFKESDPFRGSATDDFFKKQTKNDPFTSDPFTKNPSLPSKLDPFESSDPFSSSSVSSKGSDPFGTLDPFGSGSFNSAEGFADFSQMSKVKVHL

SEQ ID NO: 18521 - DNA, 3263 bp, Homo sapiens
  CDS (3)..(332)
gcatgcgcatagctaaccgcacccggttcagctcgcctttcttggccagaggcgccggttggactcacgggcggggcatgatggtggtgggtacgggcacctcgctggcgctctcctccctcctgtccctgctgctctttgctgggatgcagatgtacagccgtcagctggcctccaccgagtggctcaccatccagggcggcctgcttggttcgggtctcttcgtgttctcgctcactgtatcctccctgcagttggagggggcgggccacgtaggcatgtgcccttccccttccccacacagctctgtccccgttgcacaccctactccttaactccctcaaccaggccttcaataatctggagaatcttgtctttggcaaaggattccaagcaaagatcttccctgagaatgcttaggtgaaaggttgttaaggagaaatatatttactgaagctgtctgaagacagatgacgcttttcgattctgcaccttgtatagctcctggagttggagctggaagagaaggcctttgaaagcaagaaactttggtaccttctggccagctcccagggaaggtttgaggggaacaggcaaatttgggctgatgttttgcatctattcgctgggaggcggtccttgttcccaccagaagaagcagcaggaccaagttcactatggagttctgatgtgaagttaactcaatattagagaattctacttatttgagggaattgtgaagagcctaaatactagaggcaccaaatatctatggcagcaggaatcctgaccaaatcagaataactgttagattatttcctgtttggaataattcttgttcaattgctcatgtaatcaagaattgatgattcagttatttatggagaattaagtttataaagcaaattaagtgtcaaggccagattacttaaggaatgccacgtgctcagaaattcacagcagatgcaatctcatgtaaaaccctcatgtggtaaaacaaagatctatcatggttgcccttaatcttttctctttttttttttttttttttttgagacaaggctttactctgtcgcttaggctggagtgcagggatgtgatcactgaagccttgacctggtctcaagcaatcttccctcctcagtcttaccagtagctgggactaccagtgagtgccaccacacccagctactgttttaagtttttgtagagatggggtttcaccacattgcccaggctggtctcgaactcctgggctcaagtgatcctcctatttcagcctcccagagtgctggaattacaggtgtgagccactgtgcctggctgccctcatttctttgcccccctctaggacttgctttctccgcatagcccttttgcaggcttcagagttctttccatccagtagccccgggacttctctctgttagattttgtttccatatgtattaccttcacttgcttctttttttttttttttttgagatggagtctcgctctgtcacccatgctggagtgcagtggtgtgaacccagctcactggagcctctgcctcccaggttcaagcgattctcctgcctcagcctcccgagtagctgggattacatgagtgcgccaccataactggctaatttttgtatttttggtagagataggatttcaccatgttggttaggctggtcttgaactcctgaccttaagtggtccgcccgtcttggcctcccagagtgctgggattacaggggtgagccactgtgcctggcttttcagttgcttctgaaagaaaccattggctgggtgggatggcacacgcctgtagtcctagcactttgggaggtgtaggctggcggatggcttgggcccaggagttcaggaccagcttgggcaacatggagagaccctgtctctccaaaaagatgcaaaagttagccgggcatggtggtacgcacctatagtcccaggtactcgggaggctgaggtgggatgatcgcttgggcccaggagatcaaggctgcagtgagctgaaactgcaccactgcactccagcctgggcgacagagtgagattctgcctcaaaaataaaaaaaaataataaaaaaagaaaagatgccattgtggtggggcaaagttcttggcccactttgccttctctgccctctccacctgggcaggtggggccctgtttgtctttgcttttgtcctctcaccttctctcccatcatattccaggtaacctaaaatcctttcctgcccccatgaagaagtagatccaagcactctgccctccaacctgtgtccagggagcaaggccttcaacttccaccactggtcacccagcttaatgaattgactctcattgtctggcttcttttggaaagggtttaactgggttccccaaatgggaacacaccttgcccttcagactctgttgtccatcacctttccttttcccttttatgggaggaaagccagggtagggaagttatgtgagatttggggcagagctggtaaaaaaaagcatacatctacatccatgttctttttttttttttttttttttggagacggggtctcactctgttgcccaggctggagtgcagtggtgcgatcacagttcactgcaactttgaacttcctggctcaagggttcctccaacttcagcctcctgaatagctgggactacaggcatgtgtaccactgtactacctggctaaattttttttaattcaatttttttttttttttaagagatgggtctcactttgttgttcaggctggtctcaaactcctgggctcaagtgatctgcccacctcagcctcccgaagtgctgggattccaggtgcaagccaccacactcaacctcctacctccatgttctgggtatcattaaggtaatcagaatcctcctgctgtagtcacgcttacccttctaagcaggttccccaggattcagagagccccggatttctcctggactccatgtgcagatgcctagtatttccattctgaccgttgccctccttgttcttcttgcctccctagttctcctgtgcctcctgttggctctctttgcatctggcctcatccaccgagtctgtgtcaccacctgcttcatcttctccatggttggtctgtactacatcaacaagatctcctccaccctgtaccaggcagcagctccagtcctcacaccagccaaggtcacaggcaagagcaagaagagaaactgaccctgaatgttcaataaagttgattctttgt

SEQ ID NO: 18522 - protein, 110 aa, Homo sapiens
MRIANRTRFSSPFLARGAGWTHGRGMMVVGTGTSLALSSLLSLLLFAGMQMYSRQLASTEWLTIQGGLLGSGLFVFSLTVSSLQLEGAGHVGMCPSPSPHSSVPVAHPTP

SEQ ID NO: 18523 - DNA, 2706 bp, Homo sapiens
  CDS (216)..(899)
tgaaaatgtaaccagcagatgacgtttcttccatctcccttgcaggcacagggccatgggtgaccacggtggccgccgggaaccagcccaccctgatcgcacactcctatggagtggcccagcctcccaccttcagcccggctgtgaacgtccaggccccggtcattggggtgaccccctcactgcctccccacgtggggccccagctcccgctgatgccaggccactactcgctccctcagccgccctctcagccactgagcagcgtggtggtcaacatgcctgcccaggccctgtatgccagccctcagcccctggccgtgtccacactgcccggtgtggggcaggtggcccgcccaggacccaccgctgtgggcaacggccacatggcagggcccctgctgcctccaccgccgccagcccagccgtccgccactctccccagtggtgcccctgccaccaatgggccccccacaaccgactcggcccacgggctgcagatgctgcggaccattggcgtggggaagtatgagttcaccgacccggggcaccccagaggtaagtcctgctgccacgtgcctccccacgggcctgcgtctgcacctccctgcgcggtcactgcaacaccaccgggacagggggtgcttcatgccagctccttcactggcctccccaacccagaggctgcagtggagcctccacctgcccaagacaactggcctgagatgggggagggagggggaaggtgtggagggcgggacaaacaaagtgggaaaatgcgccggggtaagaagaggaaggaagggagagcctgcaaagcccagagcccgtccccctccagcccaagccctggccattctcacctccaacccccaaggccaggccaagctgcaaaagggtgagagtcatccactcctcttagggcaccgcagcagaacagtccctttgggggccttctccacattccatccatgaggacattcagagcatgtactgtgtccttcccagggaaggcactctctgtcgtgccatcggatgagagcactgtccacggcaaacagtctggcccaacggggtgtctacatctcttttgaaagaggacactagacggtcccagaaagtatgcatctctgggcacaacttcccagccttcccacataaaaccccttgagatggcatttcggggtgctctgcctttcggcagagcaaggaaccccactagccactctcctgtcttctctcccaagtctcttcctttgtcatttcaagcaattttcatgccttgtcaagcatcccaacaataaagctcatgtctggatctctgttgggtttaattcccaatctgactgagccctgactgcctttgttttggaaatcagcactagttttaaatgacaaaattgtagaaaattacatctaaattctggtaaactcttgctttaagatctttttttaaaaaatgactaaattgatttttttctttgcattgttttggttaagctctgtctccctttaaaaaaaaaaaaaaaaaagaaagaaagaaacttactcccagttcaagttcatgagttaccaactctgacaactgggcagcgggcatcctacttccaaggctatgccaaagcccaaggcaccgggtggcatattctgtccccacatagcccctctgggctaatgcaagatcttgctggcttgccacgttccaggcacgcatctaggaaaaggagctgttttgtgcaaaaaggtaactagctgagataggactggagtccctagtttggggctcagcaccaagctgggatctgccccaccaaagctgctgggtgcaggcagctaaacattgtcagccctgagcccatgagatcagaaagacacaggtggcggggacaggaccctgcaggacttctgtgcccactgggtcaatgaccattgcagagctgttcctgtaacctctgtgcaaggacctgagggtgtgaaccatcctctgtggtggtcctgagccaatggaagggaggggacaagaaataggggccctgctaagattccctctaccaggccccactgggcagaccgagggccaggtgtgagggccagggatggggtgggcctagaaagtgtcctcagccctgccttctggtgagccagcgggacccaccagctctagccagtgacaacaactgaccggtccatcaccctgatttccagaggttgccagcacactggctctttcctcgaaattccatgtaactcgcttctctatttacggcctcatcagctgatggagccccttatatttgcagggaagaaagagtgacgcacgcgcctacaaatgcctccaaactcaagcctgggtgggttttttctttttttaatatataagtaatttctcttttcatttctaatcttaaaagcctttattgctgaagctataatttgtctgtcagatctaatgtcaaacaactgcatattttttaaaataagaaacccgaattttgaaactaaatctttgaaacttgccatgtgagagtcgtgttcctgacaggaccacgtgggcttggatctgggtcacttttaattttgcccctagggattttacatctctgaagcccaattgatttcacactcctaaatgacagacagctggctccaggcaggaacaggaggctctgcgtgatggcgtcaacacaagtcagaactccactttag

SEQ ID NO: 18524 - protein, 228 aa, Homo sapiens
MPGHYSLPQPPSQPLSSVVVNMPAQALYASPQPLAVSTLPGVGQVARPGPTAVGNGHMAGPLLPPPPPAQPSATLPSGAPATNGPPTTDSAHGLQMLRTIGVGKYEFTDPGHPRGKSCCHVPPHGPASAPPCAVTATPPGQGVLHASSFTGLPNPEAAVEPPPAQDNWPEMGEGGGRCGGRDKQSGKMRRGKKRKEGRACKAQSPSPSSPSPGHSHLQPPRPGQAAKG

SEQ ID NO: 18525 - DNA, 1792 bp, Homo sapiens
  CDS (463)..(870)
acgttatcttcagggagtttcaggaggtttttggctcaaggcacccaactgtcaggcacaaagaaagcattgtgtccctaccctcactgctctcctgtgcccaggttattaacacaaattccattattgtcaaggctttggctagaatggcttgttcctgctggggctgaccattagaactgagatggaggaacaaaagctcccccgatcccgatcctaaccttccacccagtcccctcccactccccaggtcccataaagtggcgggagcatcgtagcgtaggaagaagccgccacaccttcctccataacctgggaggatggaagagctcttcgaagctttgctcttcgtgtccccctgaaacaagggttactgtgagtcttgcacacaaggaacatgcgctccaaggttcctagccaggtgggtgctctgcaaagttagggcaaagagagtctggccacatgcagcctctccactggagaaggattttcatctgccaggtggcggggcccttagcctcgttaatcctgcttaatcctgctagaacatacctacagggagcccactttccacgcagagcatcccttgaaggaggggcttcccagaatgctgaggattctgggcttctcagactccgatcagatgcacctcagccctgggatcagtgccccagccctgcctgccagtttcctttttcacttcaccatgagcataagtttgggtgggaactcagcctgttcattcacttcatactgagttcccactctgtgccagggcctgacctgtgcactgccaaaagagcagggaacagcaaaaccctttcctcccaccgtgggccttggagaatgaatgcagggggtggccacgggtagtcgtctggggcttggttctccctgagctaacctcgccagcctggcccagcttgccctgatcccctgatggtccgtgcacatgtgtttatacttgcattgttgactggggtccaattgcctttttggcaaaggcatcaagcattcaaagatgttcagatcttttctgtctggctcttttcctcggaatgaggctccagtgtgtccctttagtcccttagccattatctgagaggctagaattctggcagtgtccccgtgcatctttccccagtggaggagagaactctcggaccagtgagctagagaagcaacccaccccggccgctggaagcaggggaggtgaaatgtgtccaaactcctctcaggctgtcagatggccttgagcggcaccaagtagaaaacgcgctcccacccctgaccttctcctcagcttcattgtgagacctcaagttcctcagcttccaggatgatcaacctagctgaaaacctgaagtccctcccggtacaagtccaagcagtccccagccagggagaccaggtgttgtctgacatcccacacacatcggcacacttgggggattgcaaaagggaggaagggagccaaaggctagggccccggggttcagctaacactcagcacccctcccaaagagcgccccctgtgtgttctggatctctagaggggtttggtttgggccaagtagtgcttagttttaattttctctttctggaaataaatacttttaataagtaaagatgctgctcagctgtcatatcctgcaaggttagaggaaagatgtgggccgtgcgcggtggctcatgcctgtaatcccagcactttgggaggccaaggcaggcagatcacttgaggccaggagttcaagaccagcccaggcaacatggtgaccccatctctacc

SEQ ID NO: 18526 - protein, 136 aa, Homo sapiens
MQPLHWRRIFICQVAGPLASLILLNPARTYLQGAHFPRRASLEGGASQNAEDSGLLRLRSDAPQPWDQCPSPACQFPFSLHHEHKFGWELSLFIHFILSSHSVPGPDLCTAKRAGNSKTLSSHRGPWRMNAGGGHG

SEQ ID NO: 18527 - DNA, 1772 bp, Homo sapiens
aatttagaatgtcttacactgtacctattttttcctgtgtaagtctcaaaaacttgatttagacttgaaggttttatgaatgtccctacttttttgttttaagagggaggaagagggaaggagagggaggccatttgattgagaagggcataaatcgcagtggatgagttaccacaaagtcagtccatatgggttacaacagttcaatcaagaactaggccaggcacggtggctcacgcctgtaattccagcactttgggaggctgaggcgggtgtatcacctgaggtcaagagttggagaccagcctgaacaacatggtgaaaccccctttctacaaaattagctgcgcgtggtgctgcgtgcatgtagtctcagctacttggggggctgaggcaggagaatcgcttgagcctgggaggcagaggttgcaatgagccaggatcgtaccactgtactccagcctgggcaacaagagcaaaactccatcccaaaacaaaacaaaacaacaacaacaacaacaaagaactaaaacataatagcaaccaggaagcccccgggtaggctcgctccctggtaaccattgtcctgacctctattcccattttcttgttttggaactttgtacagatagattcactcagtatggattcttttatacctgacttcatttcctcaacattgtattgagatttgtccatgtcgcatgtagctgtagttcattcctttttcttttcttttttttttttttttgagatgaagtcttgctctgtggccaaggctggagtgcattggtgcaatcatggcttattgcagcctccacctcccaggctcaagcgatcttcccacctcagcgccgcgggtagctgggactgcaggcatgtgccaccatcctcagctaaatttttttttttttttttttgtagggacagggttttgccgtgttatccgggcaggtcttgaactcctggcctcaagtgatctacccatcgacgcctcccaaagtactgtattatagatgtgagctagtgtgcccagcccattttgacttctgtataatactatagcatgcatatatctacatttactcatgtgtcctacttttgatgagatttgtgttgcttgtagtttggactattacaaattattatactgtcattatgccttttggtatatatgtattttcatttctctagggtatgcctcagagtggacttgtaggattgggttagactatgcatttttctaatcccaataacataattttttttgagaaggattctcactctgtcacccaggctggagtgcagtgacgtgatcttggctcactgcagcttctccctccacggttcaagtgattctcctgtctcagccacccaagtggctgggattacaggtgtgtgccaccatgccaggctaatttttttgcattttttatatagagatggggtctcatcatgttggccaggctgttcttgaacttctgacctcgggtggtcctcccgcctcacacctgtaatctcaactctttgggaggctgaggcaggcggatcatgaggtcaggaggtcgagaccatcctggctaacacggtaaaaccctgtctctactaaaaaatacaaaaaaattagctgggcgtgatggcgggctcctgtagtcacagctactctggaggctgaggcaggagaatggtgtgaacccgggaggtggagcttgcagtgagccgagtttgcgccactgcactccagcctgggcgacagagtgagactctgtctc

SEQ ID NO: 18528 - DNA, 3110 bp, Homo sapiens
  CDS (1454)..(1756)
acattccacagcagcgcgctcacgcgtgttcgcactcaggacagccacgcagctgctggtgtcgcccgtgtgctcctgcggtgtgggatggtcgcggtgtgggacggtctgcggtggtgtcttcgcgttccccagggagtgtgccctgtgcatctccatggtacctgaagtccaggaagctgcctgcggatgttgcagttgggattacggggcagatgcagtggtcggtaggagcgagtgttcggggaagctgtaggtgttcgtggcgcgttggctttctggtaattcctccggctgcactagacatgccgcactgtgtgtccttccgtagcattgagagagaagagggaggatgcccaggtaaaagatgggaaatagcctagaatatcaactgtgatggtccctggtggggctaatggtggcaaacttttctgcttttttgtaaagaaataacacagggtcctaaaagcccgtgtatcctggaagcagggggtctgcgtcggaacagccgactctggaagggcgttggctatgtccctggacgtctcctgcagctcctcccatctcccctgagtctggcccagctggaaaggatgtgggggccacaggttaagtggccaccctggggcctgtgttcccagactgcctggctgtgctgggagttctgtcccgggagagacacagcttcgtctcggctgcggccgtgtccccaaggctctgttccctgtgtgcaaaggtggatatgtcttcctttagtctcctcatggccacaatttaatttttttgaaaagtttttggccaaataacctggctaccaacccggggccccagtgttgggaggagggtgatgtggggaaggacgtgactctgggacagtgcctgcctccaaaaagtgcttcctttcttcctcttcctccaggtaaattcgaaccaccattatttcacccgaatgtgtacccttcggggacagtgtgcctgtccatcttagaggaggacaaggactggaggccagccatcacaatcaaacaggtacggggcctccgcctccggcacgggcagggctgccttagtctcccctccggacacgtgggtctgtggtcattctctgtggctgaggccgagtctcacggtgtctccctttcaaactgctcacacccgtcttgtgtttttgtctctggcacagatcctattaggaatacaggaacttctaaatgaaccaaatatccaagacccagctcaagcagaggcctacacgatttactggttagtagcagccctggccccgctggtggcagctcctccccgtcccagccaaggccgcctggcaggacgggagtggagcacacaggctcaccctagggacagccagggtccgcgcctctgtggggaaggtcggggggcataaaccctgtgggcagcaggcaccgttgcacaccgtctgcggtgggcatggatggcgccggagccgtgtccaggggagggagcaggccaggtgacaggggctgtcttgggccactgccccagtgagttgtggccagctaggaggggaaggaccctgggcgtgggtgccagaggaggccatgctgagaggcctctccaccggctcagcctcccgtggaccccagcctcccgcgccgcccttgctgcttgtccccatcccctctacaacttggttccttctgtgggggggcccagcccagcagggctcagtgacgtgatgctgtcacacggaccctgggcttccaccctgtccctgtgaggtgctgctgtggctagaagggtccccgtgggcctggggtcctgtctgcaccgaggagggcctggtgtgagttaggatgcagacgacagccaaacagtgctggggaaagcagggaggaccctgccctgagcagaggccatgcgcccgcctgtcctgttccctctgcagctgttctgggcaggtccataagaaggtgggttggggcctccgacccccactgctccgcctgcagggttgagaaacccagccccatctcaccacgggtccccacacctctgaggaggtctcagggcccccaatggccagggacccagaaggctcacctgcagccaccccacacatccctgccactgtgggcatcagaggccctctccctccagggtgcatctcctggtcaggaggggggaggcccggttgccttaggcccggcctgcacaggtcgtgaggaaaagcacctggtttcggccgggcgcggtggctcacgcttgtaatcccagcactttgggaggccgaggtgggcgaatcatgcggtcaggagttcgagaccagcctggccaacatggcgaaaccctcgtccctactaaaaatacaaaaaattagttgggcgtagtggtgggtgcctctaatcccagctacctgggaggctgagacaggagaatcacttgaacccgggaggcggaagttgcagtgagccgagatcctgccactgctctccagcctggcgacggaggaatgctgtctcaaaaaaaaaaaaaaaaaaaaaaaagcacgtggttttggagagatgtgtttctccctggatgcgggcccagcccaggtgtctgcaaggtgccctccctggtggccgagggtggcacagaggccccaggcagggagcaagtatcacagcagccaccccaggctcagcctcccaagtagctgggattacaggcacccaccaccacacctgactaatttttgtatttttagtggagacagtgtttcaccacgttggccaggctggtctcgaacttctgacctcaggtgatccacccgcctcgcctcccaaagtgccgggattataggcatgagccaccgtgcctggaaaatgatttctaggccaagtgtggtggcccaacacctgtaatctcaacactttgggaggccaaggtgggctgattgcttgaactcgggagttcatgactagactgggcaacatggcgagaccctatctctacaaaaaattaaaaaatgtgccaggggtggtggctcatgcctgtaatcccagcactttgcaaggccactgtgggacgttacctgagcccaggagttggagaccagcctgggccacatggcaagacctgctctcttt

SEQ ID NO: 18529 - protein, 101 aa, Homo sapiens
MAPEPCPGEGAGQVTGAVLGHCPSELWPARRGRTLGVGARGGHAERPLHRLSLPWTPASRAALAACPHPLYNLVPSVGGPSPAGLSDVMLSHGPWASTLSL

SEQ ID NO: 18530 - DNA, 1324 bp, Homo sapiens
aaaaagtaatggtaatacatgtttcttgtgaagggaaaataaacaaggtccagttttattttactagatagcaaataaaaaaaaaaagagggattagtgatttcagtcttttagaaatggttggcatctctctgccttagttcttacctcacttgtaaaggattgagttcttccttaatgttttctcctggtatgagaatgtggttatattctttcttaggtaattgatatgaatctaacctagtttttttttttgtttttttttagttactttaagttgaaatgtaaaggagcagttggttctgtacatttccaagcttctctgtaataattgatcattacaatgatgaccctaaagcatcaggaaaatactgtatactatatgctcagagatatatatatgtatatatatatatatatttgatggagtctcactgtcgaccaggctggagtgcagtggtgtagtctaggctcactgcaacttctgcctccccgggtttaagtgattctcctgcgtcaccctcttgagtagctgggactacaggtgtgcaccaccacgcccagctaatttttgtgtttttagtagagatggggtttcaccatgttggccaggctggtcttgaactcctgacttcaagtgatccactggccttggcctcccaagtctgggatttcaggtgtgagtcactgcacccggcctatttttctaaaaaaagaaaaaaaaagaaaaaaaaatctggaaagagggagctgccttacatttcagtctatatttattagactcctaatgtacatttctctctcactttctttattttgaaaaacaaagtactattcagtaaagagcctgaaactgcttcagtccaagctgattttgaatgcataaagatttacttgttggattcagtaaaaaaggaataagaaaaacttactatatagtaatttttcctaggtatatgacctcaaaattgtgcttagatgccattgaaatagatgttcatgttttccattccactcaacaaatatcacttaaaaacagtacagttggtgatttcttacagaaatcataaatatgtactgcggagtgaaaaaaccaactacttaactatgatgaaatgggaacttttggttaaatttgtagggataggccaggtgcagtggctcatgcgtgtaatcccagaactttgggaagccaaggcgggcagatcacctgaggtcaggctggtcttgaactcctgacttcaagtgatccactggccttggcctccctagtctgggatttcaggtgtgagtcactgcacccggcctatttttctaaaaaaag

SEQ ID NO: 18531 - DNA, 2195 bp, Homo sapiens
  CDS (136)..(870)
gtggcttgcagctcggggtgggtggctcatttcctggccgctcctgggcttcgcggaaagaagagattactcacactccttctcaagcacagaaccagttgtactgagctttttgctaagctgtttcagccaagaatggctgtggaatctggagtgatttcaaccctgatacctcaggatcctccggaacaagaactaatactagtgaaagtagaagataacttttcctgggatgagaaatttaagcagaatgggagtactcaatcctgccaagaattgtttcgtcagcaattcagaaaattttgctaccaggagacacctgggccccgggaggctctgagccgactccaggaactttgctatcagtggctaatgccagagttgcacacaaaggagcagatcttagaactgctggtactggagcagttcctgagcattctgcctgaggagctgcagatctgggttcagcaacataatccagaaagcggcgaggaagctgtgaccctgttggaggatttagagagggagtttgatgacccagggcagcaggtcccagctagtccacagggaccagcagtgccatggaaggatttaacatgtctcagagcatcccaagagtcaacagacatccacctccagcccttaaagacacagctgaaatcctggaaaccatgcctttcccctaaaagtgagttgtccagacctcccaaagcttcttcagctatccgttgggaatgtgtttctccaggaagttttcccggcgatatcatagctgctgaggctacacattcaacgatttcttgctttgccatcaacactttgccagccaccatcctgccatctaaaaatgtgaatagaaagtatttttcctgaagaacacatcgtcaataaatcacctgcacccaaatctccatctcaggcgctacttctggcaaggcatatcatgaggctagtgaagcacctacaagaaacttataactcaaggttgtaaaaatggcatggtgactcttacaatcatatcacagtgggcctctccaacaatttaaacctcatgacctaggtgaaagctgtgaaaggatccacattaattcttcagaggcagggctaagactttcaagactgaaaagagactagcataaggagacttaacaggaacccagtcaaggccattcatggccatgggaccacgcataaatggagaacgagtaaattttgctaagtccaaggacattggagagatagagtcactattactgatatggtgactgagtcaacaacatactgccactatgaagtaataagaaaataaaaagttaaaaaatgtaacagataacagttggagggtgaatatattttaaatcaatcagattctcattagagtattttattttgtcttgatccccaaacttcagatgaatgtggagaaactgaagcatgtccagagaaaagtggcaagatatccaaacagacagaacacagatgggatcagagggagtgagaggcttagttaaaacaaggtcaggaggctgggcacgatggctcatgcctgtaattccagcactttgggaggccgaggcgggtggataacaaggtcaggagtttgagaacagcctggccaatatggtgaagccccatctctgctgggggtacaaaaattagccaggcgtggtggcgggtgcctgtagtcccagctactcgggaggctgaggcaggagaatcacttgagcccaggagttggaggttgtagtgagccaagatcgcaccactgcactctagcctgggcgacagagccagactccatctcaaaaaaaaaaaaaaaaaaaaaaaaaaaaaaaaaaaggtcaaagtgcagtgtactcactgcattcaagtatagattgtgttttatgaggactctgtaaactaaagaaagtggattatgaataaattaaagttgggagtatttcatatggacataaggaagaattttaatatagtatgtttactagggtttccacaacaaaataccacagaatgggtggtaaacaacagaaatctcttttctcacaattctagagactagaagtccaagatcaatgtgtcagcaggtttggtttcttctctctccttggcttgcagatgatggccaccttcttttcttgttgttgttgagatggtctcactctagcctgggcgacagagccagactccatctc

SEQ ID NO: 18532 - protein, 245 aa, Homo sapiens
MAVESGVISTLIPQDPPEQELILVKVEDNFSWDEKFKQNGSTQSCQELFRQQFRKFCYQETPGPREALSRLQELCYQWLMPELHTKEQILELLVLEQFLSILPEELQIWVQQHNPESGEEAVTLLEDLEREFDDPGQQVPASPQGPAVPWKDLTCLRASQESTDIHLQPLKTQLKSWKPCLSPKSELSRPPKASSAIRWECVSPGSFPGDIIAAEATHSTISCFAINTLPATILPSKNVNRKYFS

SEQ ID NO: 18533 - DNA, 2001 bp, Homo sapiens
gttgttggggccgtcgaggcggcggcgactctgcgtccccggctcctgatggaggcggggccgcatccccggccggggcactgctgcaagcctggggggcggctggacataaaccacggcttcgtgcaccatatccgacggaaccagatcgctcggtaccgccccgccctgcgccgccgccgccaccactcctggcctggcctggcccggcccgacagtccctgactcccgctcggctccccgcagggacgactatgacaagaaggtgaagcaggcggccaaggagaaggtgaggaggcggcacacgcccgcgccgacgcggccccgcaagccagacctgcaggtgtacctgccgcgacaccgaggtgaggccgcccgccccgcctgcctccagcccgcgcgctcttcctgcaacgcactccccttctctatagggaaaaaccacttcttactcctaaggttcagctcatctcgtctctttccggaacctccacctcagcgctcccaaatctccgctgaatgattctcaccaagaactgggacgactcataagcccccagttaagcatcgctgtcagagtatcggggagccagcaagaagtttatctgccggtttgccccaccgtgctgtattttagtaaggtgctccgctacctagcaaagagaaagtctggcacagcgatgagcgaccagcacataattgcggaatgaacccagtaaatggcctttccccagcttctctgctacctagagatcacactggttaatatatgacggtcaatttttgttaagcattattactttttttaaaatgtttttattttatttttgagactaggtctctgtcgcccaggctggagtgcagtggtgcgatctgggcttactgcagccttagcctcccgagtacctgggaccgcaggcgtgtgccaccacaccggttaattttggtatttcttgtagagaaggggtttccccggctgggcgcggtggctctcgcctgtaatcccagcactttgggaggccgaggcgggcggatcacgaggtcaggagatcgagaccatcctggctaacatggtgaaaccccgtctctactaaaaatacaaaaaattagccgggcgtggtggtgggcgcctgtagtcccagctactcgggaggctgaggcaggagaatggcgtgaacccgggaggcggagcttgcagtgagccgagatcgcgccactgcactccagcctgggcaacacagcaagactcggtctcaaaaaaaaaaaaaaaaaagagagagagagaaggggtttctccacgttgtccaggctgatctcgaactcctgagctcaggtgatctgcccgcatcggcctcccaaagtgctgggattataggtgtgtgccactacctttgttaggcattagtgaaagtgcttttagatcttacgtatattaattcattgagtctttatacaacctcataagaaagcttctgtctgtttcacagtcaggaaacaggcacagagaggttaaacaacttgcccaagatctcagctagtaaatggcagagcctggatttgaacccaggcagagctctatccacccttctgctttccagtactttttgctagacaaatgtgcattgtgtacctactgtgtgacaggattgtgctggcctcagagcagggatgcaaaggtaaataagtccttgattggcagcacaccaaatgcttacactggtccgggcgcggtgattcatgcctgtgatcctagcagtttgggaggccgaggtgggcggatcccttgaggccaggagttcgaaattaacctggacaacatggtgaaaccccatctctactaaaaatacaaaaattagccaggcatgatggcaggcggctgtaatcccagctacttgggaggctgaggaaggggaattgcttgaacctgggaggcagaggttgcggtgagccgagatttagccactgcactccagcctgggcaacagagcaagactccgtctc

SEQ ID NO: 18534 - DNA, 2806 bp, Homo sapiens
gtttgggttcctgtattttcaccagagggagttagtcctgccccagttcagctggtcctcaaagtgtatatagctctttaaccatcagcaagtgtctatcagaacataatcttgatttcagctgctactaaatatctaccaggagactgcttgagagaattgcctgatgggtgctgagtccaccattcctgagatactttgaaatcagtggcttaacccaagctgtgtatcgggaccctctcaccgtggtcccaatggagtcacttttcttaggcgcccccctttaccttgggctctgagcttcctctgcctttcatctctgtgggatgaagccccaccgcccttcaggatgcaaagccctcttctctaatgtgagtgcagggccaggtgcagtggctcacgcctgacctcccaacactttgggaggccgaggcagggggatcccttgagcccaggagtttgagaccagcctgggcgacactgtgagaccctgttgcctgaattgccctgggagatttcctcagcttgtgctgggggcatgtggccccatgaagcccgtagtcactgttcaccctgagagacgctggctttcgggctcacacacctgctgcggggcagccccaggaaatggccaccccatttctcctggagctgcgcgtgttctcagaaactgtggtggccgttctgttttgtttgcatcttataaacgtttacctgatgacattttcctcttcaatttagctgctagaaaatttaaagtcaggttggtggctcaccagtaatgagagtttagagtagaagtaaactttatgacatagtcttagactcttcactttcttctcaaccaatatgattcacatttactttattttgctgtaccgtgagtgtctctgtgtttcctgaattccttctggaataaggcaggttgttagtaagcacaggtttctggtccatctcacagcctcaggcagtgggcattgctgtcggtgctccctttccgggttacctgtggtagctctcaagttgcagggctgcgatttgaagcctgatttagtacaccgtgtttctgttgtgttctgtggtggtttgctcctcacatgtgagcattcaccgtggccctgtgtttttccaccacacctctgcctggtggcatcctactggatgtctcagccgagccactctgttctgaagatgcccttgtcctccacccctttgctttgggctctaagcttcttctgcctttcatctctgtaggatgaagccccacccgcccttcaggatgccagccttggcaacattgtgagaccctgtttctacaaaaagtaaatgagtgtagtggtgcacgcctgtattcccagctacttgggaggctgagatgggaagatcacttgagcctgggaggttgaggctgcattgagctgagatcaagccacggcactccagcctgggagacagagcgaaaccccatctcaaaaaaacaaagaaagtggatgcgcgctgctcctgccattggatcatcgcagcatttttcttttctctgatatgcacctttttcctcatcgtgggggctcacgttttcatagttccctctcactactaggttgtgagctgcgtgaaggaaggttcatagttgtgttgtatgtacaggcacacaaaatttgtccttggataaacacatatcctcttccttcttctctctgaatttctttattttaagaaaaaaattagagatggagtctcactgtcttgctcaggctggtctcaaactcctaggctcaagtgatcctcctgcctcagcctatactaatatgaattcctatactaatatgattgaaattagtttgatttctataataattgtgctcccagattgggcttctgttttgatagtagaactaaattattaggctatttcaagaaattaatatattactggtagaaaaactgaagctacaaaatggcctggtttctcacttcagttaaatttgtgcttctgagtgcttgtattctaggtgaaaccacactgagaaggtatttgtggcccatacactgattccttcatgagacttgtttgcacaggagagctgctaaaaattactgctctcagggaggtctgtggtgaacaggtatgaagaagaagactgttctctgcccttctttttgcaataaaatgttccaaactatcttgagtttgatcccttttcgggtgtttggggtttttttaacattcagagtatgacacagccgcatccttgccagggccggagggagggtggatggacttataggtgttgcttgtggctgggtgacttgcttctgccaacaagattttcacagacacggcacaagcagaagcctggaatgtgtggcactgccaggcctgccctcttaggctcttgattttccccacgagatatgcgtgccccagggaacggcggctctggctgtggaatgagaggcgtgtggagcaggcatggttcccaccctcagcctagagtcaaggccagactagatcagcctaagcccagccacgccacgggtgcagcagtgaagagcaaatgccaactgtccatgacagtgactttcaaaggggcgtgtcatgtgcctcatcccagcaacagggaaggcacttctctatcagtcagttggtaaatgattattgacaatgtgtgggaaggtggagttatttgagtagatttggcctctattctcatggagcttcctttctagaggggaaggcagatgatggatgaataaatataaatgattctaataggttggtgcagcagtcattaaaagtaatggc

SEQ ID NO: 18535 - DNA, 2481 bp, Homo sapiens
  CDS (98)..(427)
gtgtaggtgcatttgtttaaaaaatataactccccattgcctctgggataaagtcttatctcagtttacatatattcttgataacctctccaactttatgtctcaccacccccactcacttcgtaattcgtgccttatcagaatggacctgttatactggcagttcaccatatataccattacattttgtttctcccatctctcaggtagacttacactttcggcccagcacatcagtcatcgcccttgcttgctttcctattcactcctgttctggaaggtgcaccaccttttcttggaaggcttcccttgctctcccaggctagatgagatgtccttccatcagttcccacagcaccctgtgcatgtatctgttgtgcacttaccaatagtatacaagggatctatgacccaagtctctccccactagcttgtaagctcctcacagacaggaaccatgttttgtctttgtactccagtgcctagtatataagagatactcaataaataaatatttgtcaaatcaactaattgattccttgtgacctaattctagagaatgggaagaaggcctgttattttgttgtcctttatggttctttaggaaagctctccaagcttggcatttgtcagggtgggaggaaaactgttgaagtattaagactggacacatggctgctaattcatcagcttatcattgaaaaagtccatagccaaaacctgactgtgcacttactataggaccctgacctgcctgggtctccctgtctctccagccagtatatttaaaggtaatgagataatgatgagtgttttgaaaaatgtttagtgttcaaatagaaaccattcgtgtcccttcactctctgaacatagtctgcaaatctctccctctctggtatgtttctgttttgtggattagactgctaaataagcgaagagttagttttgaagttcaggtcaacaaattcctgtttggagacgggctgttcctgaataccaggttgttatctgtctattacagccccttcacttctgggctcctggccctttgcgaagtacttcagaaagcctagagagaagagagggccctcaaatcccattccagcccctaaatgaaagtggcatcacaaggagaaaagtggaggtagaaatgtaccatgggggacgttgccccattgcctttcttcccctgactactgggcttcctctatcagcttttaacgcctggaagtagctgagtctccagtcactggtggccttccccaagtgagctcagcagcatgtgctaataggtgccaatactgtgctggctccagtgggattcctctctgcaaagctgctggcttagcttgactgtttccctattcctctccttagaactttcatagccagtcaagcatagaattgcatccattcttctgaaataggtactgtgcctaatttttcattggcttggccaagattctgttacctgtaattatgtcatatgggctgactggtgtaggtttggtaggcctcactgctctccagaggctagtgttcctatcccaggatggctgttgggattaggagtggaatgaggaatagtttaggaccacaagagatttggcctccttggaacatgtaggaaggcctcaaggatgtaattctagcccagggaagaaaatccttttcagcagacgcttcccttcccttcccctagggaatgtgtccctactatagtaaactcttccttaagagagttttatgttttctctgtcagatcaatttgtttttcttaatgttgttcctatcaaaaaaaaaaaaaaggaagaaatacagtcctcagacctgacagtttcatttttccccccaagtagaagcaatagaaaccttagcagttccaagactcctggcactcacttttcctctccatctttaggtctaacccagctcagcccagagtaaagacataaaagcctcacatgtgatttcctcttgcattttttctgctagaagggtccacagtacttactttatgcctcatctcaattgaagctggatgatgaggatagtgggcagtgattgcaattggggaatgcatgtactggatcacataaggtcatgaaagtccttgaaacagagccttgccaagcagaacccttgccactcatggtattcgatacagtctacccatctgacatgaaatgatattcttaatgagccattcctatggaagatagctattgccaggcacattcagtctcctggtctccctctcatagctatgtagggcctatgacctagaataaatggaaaaatgttatcaggaggaagagactgctggactcccctgagaggtagggtttgtgctaggagagctgggtgccatttatttcattttgatatatcaggtgctcctagtaacaattcctagtttctcttacctctgtaatcatcctgaatagtcactgcttcttgagctttggtgagtgttctct

SEQ ID NO: 18536 - protein, 110 aa, Homo sapiens
MSHHPHSLRNSCLIRMDLLYWQFTIYTITFCFSHLSGRLTLSAQHISHRPCLLSYSLLFWKVHHLFLEGFPCSPRLDEMSFHQFPQHPVHVSVVHLPIVYKGSMTQVSPH

SEQ ID NO: 18537 - DNA, 1669 bp, Homo sapiens
  CDS (839)..(1210)
gtgctaagaaaactgccccacatcatctgcagtaggacgggggagttggagccctggtcaggccactctgctactgaccacagttttctcatctctaaaaaggcgcagtaacaatataattaccgtatgcagtcccccaggatacagggtcaaaggagagcacaaccatcgcagttggaagcccatggggcagcccagtgcagatgcatctgacttacgaaacttcagtgacacctgctctgtgccagacactgaagatggagcagtgaacagcactgacccagcctgtcctcctgttgcctgcaggccagacggagtctcactctgtcaccaggctggagtacagtggtgtgatctcggctcactgcaacctccgcctcccaggttcaagcgattctcctgcctcagcctctcaagtagctgagattacagacgtgtgtcaccatgccctgttaatttttgtttgtttgttttgttttttgttttgttttgtttcgttttttgtttttttttttgagacggagtcttgctctgtcgcccaggctggagtgcagtggccccgatctcggctcaccgcaagctccgcctcgcgggttcatgccattctccggcctcagcctcccgagtagctgggactacaggcatccgccaccacacccagctaattttttgtattttttttagtagagacggggtttcactgtgttagccaggatggtctcgatcccctgaccttgtgatccacccaaggcctcggcctcccaaagtgctgggattacaggcatgagccaccgtgcccggtcaatttttatattttttgtagagacagggtttcaccatgttggccaggctggtgtcgaactcccgacctcaggtgattgtcggccttggcctcccaaagtgctgggattacaggcgtgagccaccgcgcccagccggtgggcagccagttgtgttccgggaggaggaggacaccctggaaagacagtggggccagacactgaactgcctttggaagcaagtaggagcaacagcgaaggtttgctggctcagaagcaaggtctcgctgtgttgccctggctggagtgcagtggctacttacaggcatgatcatggcatactgcagcctcaaactcctggactagagcagttctcctgcctcagcctccagagcggctgggactgcagacacgcaccacagagcccagcctgagtcattttgattctgtaactggcttcctctcggcgggcaggctcacaccctccacccccagctggagatggaaggaggatgctcaccgcccattcctcatgcaggccatcgatggaaatgtcagacagtgcgagtccacgcctgaacacttctggggtccgctctgggactgacactggcagatccatcgatgccgttccattgtttgctgacttgcattgattctatgagaagtctgcagtcttttgcagcgttgttttcctatgtataattgtctcctcccaccccactcaccccagctgctttccacattctctctctttgattttcagcagtctgcccatgatgtgcctaaataggactttctttgcattcatcttggctggggctcactgaactttctgaatctgtagattaattttcttttttcaataaaccttggaatattttcagcat

SEQ ID NO: 18538 - protein, 124 aa, Homo sapiens
MLARLVSNSRPQVIVGLGLPKCWDYRREPPRPAGGQPVVFREEEDTLERQWGQTLNCLWKQVGATAKVCWLRSKVSLCCPGWSAVATYRHDHGILQPQTPGLEQFSCLSLQSGWDCRHAPQSPA

SEQ ID NO: 18539 - DNA, 1753 bp, Homo sapiens
gtttatgcttcctgtattttgaggcactgttattagatgcagaaacatttacagttttgtcctcttgattatttgacccctttatcattctgaaataacctttatttctggtaataatcattatattaaaaaccattatttggccagacatggtggctcatgcctgtggtcccagcactttgggaggccgaggcgggtggatcgcctgaggtcaggagttcgagtccagactggacaacgtggcgaaaccccatctctactaaaaagagaaaaatagcctagtgtggtggcacacgtctgtagtcccagctactcagaaggttaagtcaagataatcacttgaatccgggagttggatattgcagtgagccgagatcacgccactgcaccccagcctgggaagcagagcaagactccatctcaaaagaaaaaaaaaaaaaaaaaaacaaaacaggcctggtgcagtggctcatgcctgtaaacccagcactttggaaggccgaggcaggtgaatcacctgaggtcgggagttcgagaccagcctggctaagatggtgaaaccccgtctctactaaaaatacaaaaattagccaggcacggtggcagctgcctgtaatcccaagtacttgggaggctgaggccagagaattgcttgaagctgggaggcagaggctgcagtaagccaagatcatgccattgcactctagcctgggtaacagagcaagactccatctcgggaaaaaaaaaaaaaattacttaatattaatataaaattagtgttttatattagtagtataatactgtttttgactagtgttaaaatgacatatctttctctacccttttgcttttaatctagatatcatgatattcatttattttttaatttgtaaaaatagagatggggttttgccatgttgcccaggctggtcttgaattcctgggctcaagccacctgcccacctcaacctcccaaagcgctgggattgtaggcgtgagccaccatacttggccatatcattatattttcaaatggtttcttgttttttcgtttttcttttaaatgtaatctgacagcgtcttttaattaatgtgttttggaccattcatctaatgtgtattaatttttactcatctggatcttaggggaaataacctatcagattatagggaagtgtttctcaaagtatggttccccaaacagcacaacctgggaattgttagaaatgcaagttctgggccgggcactgtggctcatgcctgtaatcccagcactttgggaggctgaagcgggtggatcacctgaggtgaggagtttgagaccagcctggctagcatggtgagaccccgtctctactaaaaatacaaaaaaaattagctgggcatggtggtggtactttttaaaatttttttagagacagaatatccctgtgttgcccaggctggtctgtaaatcctgacctcaagcaatcctcctgcctcagcctcttaagtagctaggtacaagccaccatgcccagctatattgacttgtttttgagacggagtctctgttgcctaggctggagggcagtggtgcgatcttggctcactgcgacctccgcctcccgggttcacgcgattctcctgccccagctactcagaaggttaagtcaagataatcacttgaatccgggagttggatattgcagtgagccgagatcacgccactgcaccccagcctgggaagcagagcaagactccatctcaaaag

SEQ ID NO: 18540 - DNA, 2359 bp, Homo sapiens
  CDS (41)..(595)
ctcccgtgggctccggccggctaagccgcggcggacaactatgctgaaagccaagatcctcttcgtggggccttgcgagagtggaaaaactgttttggccaactttctgacagaatcttctgacatcactgaatacagcccaacccaaggagtgaggatcctagaatttgagaacccgcatgttaccagcaacaacaaaggcacgggctgtgaattcgagctatgggactgtggtggcgatgctaagtttgagtcctgctggccggccctgatgaaggatgctcatggagtggtgatcgtcttcaatgctgacatcccaagccaccggaaggaaatggagatgtggtattcctgctttgtccaacagccgtccttacaggacacacagtgtatgctaattgcacaccacaaaccaggctctggagatgataaaggaagcctgtctttgtcgccacccttgaacaagctgaagctggtgcactcaaacctggaagatgaccctgaggagatccggatggaattcataaagtatttaaaaagcataatcaactccatgtctgagagcagagacagggaggagatgtcaattatgacctagccagccttcacctgggactgccacatccccagtgaaatcagcatgtttctcggtgcagatctgaaatcacatccagctcctgatgttttcttctccctctgactgcagaggaagtgttcctacctgcaggaaggcacctgtcacacagggcgttcactcagaccatctgtgctctgccctgagttcagttgagaaaatcctattatcaaatttgggtttcctggccccagaacttcccaaagacctgtaaaatggagggatttaccacctcacatatgtccagttaaacagtttgtggacttgtaaccgtcgcagcccaatgatacaacagtagtttaatcacgtgtattggcttgaatgtgattttcattccttgattcacccaacaaataccgactggctgagcacctgctgtgtgtgcactgctgttctagctgctgaccatagacagcataaatgaaaaagacagaaattcccaccttcgtggaactctccattttcctaaatgttaggttggtgcaaaactaatcgtggtttttgccatttttaatttttaatggcaggggccactattacttttgcaccaacctaataggccgattcagaaacttgagtgcaatgtcttggatatgcaaaaaagaaaatcaaaacgcattcttcattctctataagagttctaggcggggcgtggtggctcacacttgtaatcccagcactttgggaggccaaggtgggcggatcatgaggtcaggagatcgagaccatcctggccaacgtggtgaaaccccatctctactaaaaatagaaaaatcagctgggtgtggtgccgcgtgcctgtaatcccagctacttgggaggctgaggcataagaattgtttgagcctgggaggcagaggttgcagtgagccaagattgcgccactgtactccagcttgggcaacagagcaagactccatctcaaaaaaaaaagagttctagcccaggagcggtggctcacacttgtaatcccagcactttgggatgctgaggcgggcggatcacttgaggccaggagttcaagaccagcctggccaacatggcaaaatcccatctctactaaaaatacagaaattcacagggtgtgttggcacacgcctgtaataccagctactcaggtggctgaggcataagaattgcttgagcctgggaggcagagattgcactgagccgagatcgcgccactatactccagcctgggcaacagacatcctgtctcaaataaattacattaaatgtttaagaagaagtctaaataagtttcatatgctgccctccctcagataatgagggaacctggggtacttaaaatgccaaatgaacgtatacttgatccttattcatagattttgtatttgagaatttgcctactcactaaaatatgtttgtaacccccaaatcaatactgtggcactttctcagttattcgcagacacacagagacaaaaaatttgaagtgcctggctgggcgtggtggctcacgcctgtaatcccagcactttgggaggccgaggcaggcggatcacaaggtccagagatcgagaccatcctggccaacatggtgaaaccccgtctctactaaaaatacaaaaattagctgggcatggtggggcatgcctgtagtcccagctactcagaagggtgaggcagaattgcctgaacccgcgaggcggagactgcagtgagccgagatcgcaccactgcactccagcctggtgacagagc

SEQ ID NO: 18541 - protein, 185 aa, Homo sapiens
MLKAKILFVGPCESGKTVLANFLTESSDITEYSPTQGVRILEFENPHVTSNNKGTGCEFELWDCGGDAKFESCWPALMKDAHGVVIVFNADIPSHRKEMEMWYSCFVQQPSLQDTQCMLIAHHKPGSGDDKGSLSLSPPLNKLKLVHSNLEDDPEEIRMEFIKYLKSIINSMSESRDREEMSIMT

SEQ ID NO: 18542 - DNA, 1676 bp, Homo sapiens
agttctccttagttttttaacctatttgcaatagttgctttgaagtctttatcttctagctccaacatctggggtcacttggggatattttctatttattgttttgtggggttttttttgtgttttttttttaatccccctgagctgtggtgttctatcttgtttctttgtatgtgtacacatttcttttgtaaataacatatatatattttagacagagtctcactctgttgcccatgctagtatgtagtggtgcgatcttgattcactatagcctcgacatcctgaactcaagcaatcccctcacctcagaccccagactagctgggactacagctccgcactaccatgctcacctaatttttgtattttttgtagagatgggatttcaccatgttgcccaggctggtctcaatccacttgcctcagcctcccaaagtcctgggattacaggaatgagccactgcagctggccaaaacatacatttttgttactttgttgtttctgagaattcccatcctttagtctctacccagcaagaagtgtttctgtaccttcatttatttacttccctgtggttgctaatgtctctgctgtgtttaaagaaagctaaaatataatttttaagtgtagcatcctagctttgccctagctttgtccatgtatctttggtttgcctctaatctcaaatataagttatgttcaatcccctcaaggcagtaaggcttctgtcgtctcctgatgaatctatgcttgggtaagtgagattgcccaaattaattcaaagttaaggctgtttaaaaatctgctacaattttctcactgatgtgttgtttcacttatcctttccatatgtgtgtgtctttagcatggccaggtttgcatataacttactcctagttaagttaatatatgtaattcccgttgtttccagccacagtgcagtagtgcttttaagatgggcatctgggctgggcgcagtggctcatgcctgtaatcctagcactttgggaggccgaggcgggcggaacgagaccatcctggctaacacggtgaaaacccatctctactaaaaatacaaaagaaaaagaaattagctgggtgtggtggcgggagcctgtagtcccagctactcgggaagctgaaacaggagaatggcataaacccaggaggcagagcttgcagtgagctgagatcgcaccactgcaccccagcctgggtgacagagtgagactccatctcaaaaaaaaaaaaaaaaaaaaaaagatgggcatctgatccaacacagacaaatgccatgcaagcctaaaagttttttatgttaaaacttagaagttctcctttctgctggggtttatatcaggagagttacatttccttcatgtacagagaataaactcaatgtagaggaatagggagaatttggagaaggacattgatcatatttttgtgttttgttttcagatgaagtctcactctgttgcccaggctggagtgcagtggtgtgatcttggataactgcaacctccgcctcctgggttcaaacaattcttgtgcctcaactactcgggaagctgaaacaggagaatggcataaacccaggaggcagagcttgcagtgagctgagatcgcaccactgcaccccagcctgggtgacagagtgagactccatctc

SEQ ID NO: 18543 - DNA, 4130 bp, Homo sapiens
agttgctgatggccaggtcctgctggtcagccgccttggacggagtctcgggcctgcttttccgttttctgtccccttactctggcttctggatagcctttggaatattccgggcgatagctgggcctccagagagagtgggctgcagggtgtgggcccggcctccccttgcctggcgggttttcctggtcagcgttcctgctgctccccggtcatccctcctgtgctgcagcctttttctctggttcagacccacactctgccgtcccactgcctgggcttgctgagctctccgttctggcttgaaggcctcgcccgagccctgtcaccggctctgcctgtcaggagggcccaagtgtgcggcttcggtggggctgcctgacactgacctctggggttgtaaaggtcccagagggtcctaagtcgggcctgatgtggctgagatggcaagagccggaacgtttctgtaaaatctgaaagcccttgatggggccgagggggtgaggaggattcccaccctgtgtggacaggagcacgcagcagcggagtgactccaccacgtgagtggggtccagcgggtgtggcactcgatgacaagacagtttgagagcggcttgtctccggggacctggcgtaggtctcctctgccttaacccttggcttttgcacttcctctgtctgtcctccatacaggcttcttgccctagtgaggactggcttcttaacagggtgagccggttcctgtcctaaccccactggcatcttacactctgggagatagcttccccctgagaggcgagtgagccacgtaaggggaggtgggcgatggcttcccttctgtcttgggttgggggagtcaggtacagtattttttcttttaaagcatcattgatcacataataaggtttgtcatagtccttaatcacagacctgtgaaatttggagaattcacggcacctaggatgggagtgagcttctgattgtgagctgatttgggagctaacctcaaggaaactcctcttgcaagccccctgctgggtgtcgtggccctcgcccagtgacctcccggggactctggacgctctttgtctgcccttccttttccctcacctcgctcccccgtgagaaagtgggactcatgcagctcagctcagtgacagagggtttattaggggtagctctgggacccatcttttggtgatttcttctctctctttctctaatggaataattgtttctgtctacacttctttattttctcctctctacagctgccttctaaaaatgtgcttttctgttcctgcagaactgaagcttgcatggcctttgttgtgactttcccgtcacgagcgttgtctcttggtattttcccataggccagcctgcaggtcatacgttgttcattttttttgttgtggttggtccagtcagccaggaccagagcaggtgggaccatgtggtgccacacgcagccagctgggcctcttcggcaggcgtgtgggcagtgggcaggtgggctgactgccactctcagatatagagctgacaccgagactggatgctgtgctgtgctaggcacaggaggggaggggaacagatgtgagtcagatgtgcggtttgccctcacaacttcactttctagttggggaattggacatttacataaatgtacaaacacctgtcatacaaaaaagaaaggaataggtgtcatccaaataccacctctgttggggtatgtggtgggcagcctctaacacggcccccggtcatccctgcctcctaggagtcgtgccctggtgggtccctgtcccttgatgtaggctggacttattgacatgcttctagtgaatagaatctggcaaaagtgatggcctgtcactctgggactgtgttataaaagcctgctgcttctgtcttgggcactttctgtctctctctctgagccttgcctggaggaattcagctgccatgatatgagctgccctgtggagaggcctgcatggtgaggaactgatgtctctggccagcagccagggaggatctgaggcccaccagcagccacacgagtgagaggggaattgagtctttacatagttgagccctagccaaccttgattgcagcccgtgggccagaggctaagcttgcctgaattgtctcagataaataacatatttatcttacagcttatttatttatctgtaagataaataaatatttgttgtttgcagctgctaagttttgggttaacttgttatgcagcagtaggtaactgatacaaggggatctcagcacagagagagctgtgaagtgccaaggaggcggcacctttggctaaggaatttggggaaggctttgaggaggatgtggtatttgagcaaggctatcttttttccatagagtgtacacctcttgtacaaggtagaacatcttgcacataacagaaggcctgtctgtcggtcccactttccaaggtgagtagaataaagtcactgttttcctgttgcctgagaacctccaaaccctctgttgaagaagggcagggctggctgtttcctggagccctcctgcccagccagacgtgtggcatctctgatgtagctgagtctcccgggcctggtggcctccatctgcagtgccaccaactgtgtgtggggctgctttgcacaccatatgctgattagggagcaacaacatgggacctgcaggcccgatgccccaggcgctcctcagacccgcgagccatcccacagtctgcccggggcagctcctcacctgccctcgtggctcttccaggctggctcagcctgtggtagaagggtctgaagacccaggttaaagccttgtttctctctcttactgatggcgaggcactgaacatcctccgtgggcctttttttttccccctccaccttttattatggaaaatttcaaatatccacagaaggagagaggagagcataatgaatgcctgtgtactcatcaccggcttcagtagttaccaactcatggcctcctgttgcatttctaacgttcatgttcattccggcaaatgtctgttctttagatggattagtccacgttgaaaaaatgtcttcaccattatcctagcattcactcaggcttccagaagctatgttggggaacatcactaatcatttaagaaatgcaaatcaaaatcacagtgagataccagctcacacttactaggatggctactattaaaaaaaaaaaaaacagaaaaaaacgagtactgatgaggatatggagaaattggtactctgtgcactgttggtgagaatgtaagatggtgcagctgctgtagaaaatattatggcagttctaaagaaatgtaaaatagagttgctgtatgatccagcaatcctcctttgggggcatgcccagattgaaagcaggatctcgtcgagataattgaacacccatgttcatagcagtactgttcacgctagccaggaggtagaaggatcccaaacatccatccttggataaatggagaagcaaagtgtgttatatacgtgcaaaatggtgtactattcagtcttaaaaaggaaggaaatcctgccatatgccacaacatagatgaaccttgagaacattatgctaagtgaaataagccagttacaaaaagaaaaatactatatgattctactaatatggggtacataaatagaaacagtagaatggtggttgctgtgggaaggcagaaatgggagctgtctaatgggtacagagtttgttttgccagatgaaaacattgggagatctttttcacaacaatgcgaatatacctagcactactgaatgtgcacttaaaaatggctaaaatgggccgggcgtggtggctcatgcctgtaatcccagcactttgggaggccagggcgggtggatcacctgaagtcaggagtttgagactagtctgaccaacatggtgaaaccctgtctctactaaaaatacaaagaattagctgggcatggtggcgggcgcctgtaatcccagctactggggaggctgagtcaggagaattgcttgaacccaggaggcggaggctgccgtgagccaagatcgtgccattgcacttcagcctgggcaacaagagtgaaaatcagtctc

SEQ ID NO: 18544 - DNA, 2338 bp, Homo sapiens
ttcggacctcaaggttccccttaacacagagcgccccgcagtcttcgcggaaagcgttcggggtaggcgatggctgcgacgcgtgcagggccccgcgcccgcgagatcttcacctcgctggagtacggaccggtgccggagagccacgcatgcgcactggtgagagtctgcccggccggcgctgctcgctgcgttccccaggcctgggcgcccggtttttcgcggggagtcccgtcatccactgcggtagctcagccgctccgcctctcttagtccccgtgattcccgccgcccaataggatcgcgccctgtaggacgctcccttgagccttggcggtggcagccttttagtctgttccggtcttccccactggttctcttgccccttgatcctgaactcctcgtagtgtttccgcggttttcctgaactcctctagacgctctcgtgattcctcagggtcccctcagaacctgacgccacccaccagaccccttaggattcctgtgaggctccagtgacccacaacccccattgtctttccacgactcttcaaaacatcctatggcttccatgggcctccagagcaccccagacctcctgagggactcccttcatccctttgattacccagagaccttcagaacttccatggagcccccgtgatcccataggacccctcaatactcgtggggttcatgtgacctcatcggaactctcaggagcctagaatacatcaggacttccggtttgggttgggttttttttttgtttttttttttttgagccagggtctcgctctgtcgcccaaactgaagtgcactggcgctatcacaccactgcagcctcaacctcctgggctcaggccatcctctcacctcagccccccaagtaactggggccagagacgcgcgccaccactctcagctaatatttgtactttttctagagacagggtttcagcatgttggccaggctggtctcgaactcctggcctcaagtgatccacccacctcgacttcccaaagtgctgggattacaggcgtgagctactgcacccagccacatcaggacttcctgtaattacttatggcccctcacaataccctcacggggctcctatgatctctctagctctcagaatgtcccatagggttcccatgattgttcaggaacccctgaagtcctcgtgagggtcccatgatcccctgggggtcctcagaacctccctaggactcccatgacccctcagaggcccccagaaccctcgtggggttcctgcaaatgagtagggcacctcaaactttctgtcgtttccccaggcactctcagaattccttcacggggctctcatgatcccccagggtcccccagcacccaggcgaaaggagcttaggcttctttgagggggagggcaggaggccagagcaatgatccaagtggaaggaactggatcagaaccctggcacagcctagaacttggggaggccaagacgggcagatcgcctgagctcaggaattcgagaccagcctgggcaacatagtgaaacctcgtctctactaaaatacaaaacattgggccaggcgtggtggctcagacttgtaatcccagcactttgggagtcctaggtgggcggatcacctgaggtcaggagttcgagaccagcctggccaacatggtgaaaccccatctctactaaagtgcaaagattacctgagcgtggtggtgtttgcctgtaatcctagctacttgggaggctgaggtgggaggattgcttgaatccaggaggcagaggttgcagtaagctgagattgcaccactgcactccagcctgggcaacggagcgagacgctgtctccaaaaaaaatacaaaaatggctgggcgcagtggttcacacctgtaatcccagcgctttgggaggccgaggcgggcggatcatgaggtcaggagatcgagaccagcctggccaagatggtgaaacccatctctactaaaaatacaaaaaattagctgggcgtggtggcaggcacctgtaatcccagctacttgggaggctggggcaggagaatcgcttgaacccaggaggtggagattgcagtgagccgagaccacgccactgcactccagcctgggcaacaagagcaaaactccatctcaaaaaaaaaaaaaaaaaaaaaaaggaaacagaaaacaaaagattagccgaggatggcagcacacacctgtagtcccagctacccgggaggctgaggtgggaggatcacctgagcctgggaggtgcagtgatcataccactgaactccagcctgggtgacagaataagaccctgtcccccctg

SEQ ID NO: 18545 - DNA, 1730 bp, Homo sapiens
  CDS (659)..(1009)
catgaatgtttatggcagctttatccataattgccaaaacttggaagcgatcaagccatgaaaagacattgctgagaagaagccaatctgaaaaggctacacatcctgtataattccagccgtattctggaaaaggcaaagctgtggagacagtcaaaagatcaggagttgccaggggtttgttgtcagtggttgccaaaggcaaggatgaataaggagaacacaggggattttatgtgataagtatcatacctaaaaatcccctgtgttcatatcatgtataaataaatgtacatagacatatacacatatatatatataaatcatgtgtatgcaatgacatgtatctatcctgtcattctgtattggtcaaaatatcaaaatccacagaatgtacaacacaaagagtgaactctaatgtaaactgtggactttagttaatactaatgtgtcaatattggcttatcagttctaacaaatgtaccacactaatgcaatagtaggaaaaactgtccaatctaaacactgggcaaaggattttaaaagatatttcacaaaggaagatatgaaaatggcaaatcagcatgtgaaaagatggttaatatctttttttttttttttttgagtctctctgttgcctaggctggagtgcaatggcatgattgccgcccgctgcgacctctgcctctcaggttcgggcgattctcgtgcctcagccttccgggtagctgggattgcaggtgtgcaccactatgcctggataattttttttgtattttcagtagagatggggtttctccattttggccaggctggtctggaacttctggcctcaagtgatccacccgccttggcttcccaaagtgccaggattacaggtgtgacccactgctcccggccaagatacttaacatctttaatcatcaaggaaatgcaaattaaaactacagtgcaataccactgcatacccattagaatgcccaaaattttaaaaactgaccataccaagtgatggcaagtgatggcaagggtgtggaacaatttgaacttttacattgctaatggcatgtaaagtggtatagcaaatttggaacattgttcagcaatttctcataaagttaatcatacatttaccatgtaacccaacagttcaacttttaggtatttaaccaagagaaatgaaagtccacgtccataaagatacttgactacaaatatccatacagttttattcaaaatagccccaaactgggtgggcgcggtggctcacacctgtaatcccaacattttgggaggctgaggcgggcagatcacttgaggtcaggagttcaagaccagtctggccaacatggtgaaactccatctctactaaaaaaaaatacaaaactaggctaacatggtgaggccccatctctactaaaactacaaaaaaaaaaaaaaacaaatcagccgggcggctactcaggaggctgaggcaggagaatggcctgaacccgggaggcagagctggcagtgagccgagatcgcgccactgcaccccagcctgggcgacagaatgagactctgtctcaaaaaaaaaaaaaagccaggtgtggtggcgggcgcctgtgatcacagcttctagggaggctgaggcacgagaatcgcttgaacctgggaggtggaggttgcagttagccgagatcgcaccattgcattccagcctgtactacaaagtgagactctgtccc

SEQ ID NO: 18546 - protein, 117 aa, Homo sapiens [sequence omitted]

SEQ ID NO: 18547 - DNA, 1604 bp, Homo sapiens
attatagtatgtgtagtgaaatggtgggattttatttttattttttattttttagagacagcgtctcattctgtcacccagggtggaatgcagtggtgcactgatagctccgtgcttgaagagccttgaattcttgggctctagcaatcctctcgcctcagcctcctgggtagctaggactgcaggcacaggccaccattcccagctaatttaaaaaattattttttttgtagacacagggatctctctgtgttgcttaggctagtctcaaagtccttggctcaaaggatcctcccacctcagcctcccaaagtattgggattacctggccaataatggaattttagaactggcaggaacgtcagagataatccaatgtgagctcttaatgatacagattaatgaagtatcaaaagatgagaggtatctaaaattcacaaaacttgttagtaacagaacgagtattagaaccagctatctaactcttagtccagtggtgtcctgtatcatacggtttcttagaaaatagatgtttccaggccaggtgcggtggctcacgcttgtaatctgagcacttggagaggccgaggtgggtgggtcacttgaggtcaggagttcgagaccagcctggccaacatggtgaaactctgtctctactaaaaatactgaaaattggccgggcgtggtggcgggcgcctgtagtcccagctgctcaggaggctgaggcaggagaatcgcttgaacccgggaggcggaggttggagtgagccgagatctcgccattgcactccagcctgagcaacaagagcgagactccatctcaagaaaatagatgtttccacaaatgtaaagtctatatgtatttatatttcaacagataattttaagaaaattaaaatggatgagggctgttccaaagaaaatattagtaatctaaagtgtatgctgaatttttttttttttttttttttgagatgggagtctcgctctgtcacccaggctggaatgcagtggtgcaatctcggctcgctgcaagctccatctcccgggttcacacaattctcccgcctcagcctcccgagtggctgggactacaggcgcccaccaccacccccggccaatcttttgtatttttagtagggacggggtttcaccgtgttcgccaggatggtcttgatctcctgacctcgtgatctgcccgcctcggcctcccaaagtgctgggattacaggcgtgagccactgcacctggcctgaatttgttatttactatagtccaacacaagaattaagatggtatatatacagtttaaaatgggacttttttactcttctgactttttgttttaaatatatagtgaaaactgttaaaagtttctcttcagatatgtggtaggtatttgagaggccttattattggctttggttgacatgctggttttggaatcttacctcctagcctccaaatgtccacagaatctgacaattcagaaaagctttatactgagaaactatacataggcaacaggcatatgccacgccagttcatgcttctgagttagacactctatggtaggggaggttggcaatccatttttgtttttt

SEQ ID NO: 18548 - DNA, 1974 bp, Homo sapiens
aaagtgaatagaattgttttcttactcaaaacactgtttaacatgacacttggctcctttctttgcatctctgagctcttgtaagatttgagaaacaattacattcaagggcagtatgcttaacctactgacatttgaactacaaagcaaagatgttcagattttcctgaaggatcaagtctttcaggccacagaattttctgtcctagttttttaatacagtagtccccccatatctgcaattttcctttccacattcaattacgcatggtcagctgtagtctaaaaatattaaatggaaaattccagaaataaacaattcataagttttaaattacacactattctgagtagcatccatgatgtgaattcttgctttgtgcggcatattcatgcttaaattctccccacccattagtcacttagtagccatctcagttgtcacggactgtcactgtatctcagtgcttgttttcaagtaacctttatcttactaatggccccaaagcacaagtgtaatgatgctagcaattcagatatgccagagaagctgtaaagtgctttcttaaagcgaaaaggtaaaagttattaatttaagcaagggaataaaaatcatatgctaaggttgctaagatcgagggtgagaatgactcttcctgctgtacaagatgatcatccccagagcacatagccgtcagactttccaaggtcaatacaaaagaaagaatcttaaagacagctagagaaagggtcatataactcatcatgctaacagcagacttctcagcagaaactttacaagtcagaagagattgggggactgtttttagcattcttaaagaaaagaaaagaaatcctggctgggcacggcggctcacacctgtaatcccagcactttgggaggccaaggtaggcagattgcttgaactcaggagtttgagaccagtctgggcaacatgatgaaaccctgttcctacaaaaaatacaacaattagctagctgggtgtggtggtgtgcgcctgtagtcccagccactccggaggctgaggcaagagaatcgctttagtctgggaggcagaggttgcagtgatctgacatctcaccacggtattccaccttgggcaacagaacaagaccctgtttaaaacaaaaacaaacaaaaaaacaggccaggcgcggtggctcacacctgtaatcctagcactttgggaggctgaggtgagtggatcacctgaggtcaggagttcgagaccagcctggccaacatggtgaaaccccatctccactaaaaatacaaaaattagccgggcgtggtggcaggtgcctataatctcagctactcaggaggctgaggcaggagtattgctggaacccaggaggcagaggtttcagtgagccgagattgcaccattgcactccagcctgggcaacaacagcaagactctgtctcaaaacaaaaaaacaaaaaccaaaaaaccatagtgagacccagtctctttaagaaaaaaaataaaaaagaaaaatcctaaccaagaattccatatcctgccaaactaagctacatgagcaaagaagaaataaaatctttcccagacaagcaactgctaaaagaatttgttatcaccagactggccctacaagagagtcttgagagttctaaacatggaaatgaaagaatggtgacacctgctaccacaaaaatacacataagcacatagcccacagaccctgtaaagcaactacacaatccaaactacagagcaaccagctaatgacaccatgttaggaataaagcctcatgtctcaatattaaccttgaatgtaaacaacctaaacaccccacctaaaagacttggagtggcaaattggattaaaaacaagacccagccttctgctgtcttcaagagacctctctcacatgtaacaggactcataggttcaaagtaaagggatagggaaaaaaatctatcacac

SEQ ID NO: 18549 - DNA, 2488 bp, Homo sapiens
  CDS (697)..(1194)
ttctttgattgtttaaccttacaaaaatttagactagtaacttatttcacactgaaaagtgagttccaggaaggttagaggccacagagtataaaaggtaaaaccataaagcctctagatgctaacatagattgctaaaaacttcagggaacggaaagatttcttaaaactaaacagtggaacaatggtatatttaactacattaaaactaaaactttaatttgtcaagacatcatttgagagcgaaaaggccggtcaaggacatgggtaagatgtttacaaatacacagttatcatttgctagcatttaaaatatataaagagttcctaaaaataaggaaggaaaagacagaaaaggctactgaaaattggacagaagcctgaagagcgacaccccagaagagctgacgtaatggccagaagtggtggaaagggctccaccttgcatgtcaccaggcaatgcatgacaaagcccaggccttccccgcagaggccaacgctgaccctcctgacagtggcaggactggaagcctcagtactctggggccctgcagtgaggacacgccctgcccagtcccatggggagaccctagcatatccttgaagggagctgtgtaagcattaggaacccagtccctgcactggaggagctcgtgcacggagggtttgtcacaactgccccgcctggaatagcccatggcactgcacagtggatggagaaactgtgattcttgtgctgggaggtggtggggcttctcccagctacatggccagtgccaagcttgggaaggttctgtttctcctactttctcgtctaggccctcctaccctagggtggtcttcctgacctgggcagtatctttgacctcgtgtgtccctccttgtccatccccagagcccaaggtggtgtttgccaaggagcagccagcacacagggaggtgcaggctgaggcgggggccagtgccacgctgagctgcgaggtggcccaggcccagacagaggtgacgtggtacaaggatgggaagaagctgagttccagctcgaaagtgcgcgtggaggccgtgggctgcacacggaggctggtggtgcagcaggcgggccaggcagaggccggggagtacagctgcgaggcagggggtcagcagctctccttccgcctgcaggtggcaggtcagtgctttggggatgctgagtgagccctgtttgtagctgctgctgtgactggagtagaaccactgctgacccagtgggctttccattagactccatccctcaacttctcccatcctctcacctcctatttttatgcctgtggtggagctgggctgcttagtggggaagggagtgaacggaagggtcagggccctccttgtccatgttgggtggtgtttctgtgcagacatgctgggtcacattttcccagtaccttctccaaactaccgatgtcccgaggtgtccaggactctggtcctatctaatgcatgagatggcggtaagccagacgtccctccctcggggatactcctgcagtccctgcacggcctcatctggccccatgtgagggctctccctgtggaaagagattttaattcgttgagtcagggtgtagggaaattccagccacacagtcttatttggaattatatcaacactgaacactgggttcccaaagttttcagtgttctgggacacacttctgtccttccctgtggatgtagaagccctgtcagagccctgactaaaacccagatccacagcgttagtgtgtgcaaaacgagtaaagagcagcacattggcaggtgcgcacacgtgacgttggaattccatttcggaagccaatctcactttccttttgcattctgttagaatgttctgtgtctgaattccccttggaatttggatagatttaaaagtgataggaataagtagctggtgtttctagcctccgcctccaggcgggtgaggaggtgacacctgagaattcctccctctcacccctgaccctgccggaaagcgaaactgagatgcgggcattgggccctgggaagcgtggggaaggggaaaggagaaagccaggtgggtttttaggtcccttccagtgccacactgtggggtgttgaggggccgcgcgaggcaggcccttccatgaggcctggactggaggccttctctaggcgccggcgctggcctgggccgcctgccgccacacaggggccgcacgcctgggccccagggcccctttgccggcgggaggccggggggaccgactgctcttggcgcccggggtcaggggaggccgggaaacctcggctcccgggcgacaggcacccaggcccttctcagccccccggccgcggccgcgccgggcctcgcttcagccgggcgattcttcccctcatttgttgcattgtttgcattaatatgaatatcttgttctgtttgttttgtctcctgagagccaataaagctgtgttttttctttacacc

SEQ ID NO: 18550 - protein, 166 aa, Homo sapiens
MALHSGWRNCDSCAGRWWGFSQLHGQCQAWEGSVSPTFSSRPSYPRVVFLTWAVSLTSCVPPCPSPEPKVVFAKEQPAHREVQAEAGASATLSCEVAQAQTEVTWYKDGKKLSSSSKVRVEAVGCTRRLVVQQAGQAEAGEYSCEAGGQQLSFRLQVAGQCFGDAE

SEQ ID NO: 18551 - DNA, 1734 bp, Homo sapiens
  CDS (498)..(956)
gagtgctcagtagaaaatgggtagccttatgtatctaccctaaaggaaaaaaaaaaaaaaaaagacttgattctcaccacagagctgctttcttatacataagaaattgcttgtagtattcatgaacgacacagccaaacagcaggccggttgtagcccacttcgcctgctcacagcccatctgggcccgcctctgcacacccgggataccccagcttctttccctcaagctgttcatatattgagtcctcccactgtcccacagcagccacttgagggcagggctgagtcttggtcacccgtgtccctagtgcctcgagcagtgcccgacacagacatacagcagaagaaacaaactaaatgagtgagcggtaggagtgctttgaagccaaggggctgagcaatctgtgttggaaaagtgtgagatttttcaagttcagaaactccaccaattttagggtgaccgttggaactcctgaagttttagcgctcagaacatggggacccaaactcgaggagaccccaacctcctctcctggaggcaggggctgctccagggcaagtttccagaagcttccctaccctgtcgagttgccaggccggagtgtgattcaggaggggagaagcagtggctgtcagaagaggctgaaaacctctgcagcctcttgcctgggacacctctaggatcccacacggtggagaggggctgcaacaccccctccaggcaggaggggcttctgtactgtccaggaagggagtgccggtcaggaggctgggatcttagcattcacactttgctcccaggcccagtgtgggacttggcacaggctccttctccctcagatgcctctgattccgaggaaagcaatttcctgcctctgagcctccaggactggagagcctggaaatacagcgaaggctgtggagtggatagatccttcagacaaggcactcgttaaaagctgtctatttggagaatgctggaaaaaccatgatattgttccctaagactattagtgagtgcggctaagtccccagccccctctcctcccagcctctgcctgtcccacagatagaaatggggcaggccctctgataaggaagcttgtcccttgaattgttcttttctcaggagattcacccttttcctttgtttcttgctctgttcacaaaagcaaagcatctgaaatgcaggccagagataaagtgcagcctgatgcaattagctgagcgcagcccacaggtcctaatgggatacggctcccgttcctccagcaggcccttacataggcgctgtgtgtcgtctgcactatgcgtcaaagccccaagtgttgcccagcctccgcatccacaccccctttctgtccctggcacagaacccaggagagccactctggtcagaggggctcagcagcaggccctgtctcccaccagctgggttcctgggtcaagtttcatcagaagtcaccgtgaggaccatggtcctcacctgagaggcctgcagatgccctggaggctcctgtgtgcttctgtgactgttcctggcaggcatctgtatccacccctcatcccacacctggttggggtctggctgtgctcctgggagctgtgctgactcttcccggggccacctctactgacacccacacctgtgcatatcccaggtatcctatcccaaccttgccagcatgtatccaggattttttttttcctattacatataatggccatagt

SEQ ID NO: 18552 - protein, 153 aa, Homo sapiens
MGTQTRGDPNLLSWRQGLLQGKFPEASLPCRVARPECDSGGEKQWLSEEAENLCSLLPGTPLGSHTVERGCNTPSRQEGLLYCPGRECRSGGWDLSIHTLLPGPVWDLAQAPSPSDASDSEESNFLPLSLQDWRAWKYSEGCGVDRSFRQGTR

SEQ ID NO: 18553 - DNA, 2522 bp, Homo sapiens
  CDS (474)..(2330)
atgtgtcgaaaccattgtgaaggctaaagaccagcaagctgcagaagcaaataagaatgcgagtattcttttaaaggaacttgatctggaaaagtcaagagaagagagcagaaagcaggctcttgctgctaaaagagaaaaaagaaaagaaaagagaaaaaaagaaaaaagaggaacagaaaaggaaacaggaagaagatgaagaaaacaaacctaaggagaattcggaactaccagaggatgaagatgaagaggagaatgatgaagatgtggagcaagaagttcccatagaacctcctagtgcaaccaccaccactacgattggaatctctgcaacatctgcaacattcacaaatgtgtttgggaaaaaaagggccaatgtggtgacaactcccagcaccaatcggaaaaataagaagaacaaaacaaaagaaacccctcctacagcacatttaattttaccagaacaacatatgtctttagcccaacaaaaggcagataaaaataaaataaatggagaacctagaggtggtggtgcaggtgggaatagtgattcagataacttggacagcacagactgcaacagtgagagtagcagtggtggtaaaagccaagagttaaattttgtgatggatgtgaattcctctaaatacccctcactgctccttcattcccaagaagaaaagacaagtactgctacttccaaaactcagacacgacttgaaggtgaagtgactcctaattccttgtcaaccagctacaagacagtgtcattgccattaagctctccaaacataaagctgaatctcactagccctaaaaggggtcagaaaagagaagaagggtggaaagaagttgtacgaaggtcaaagaaattgtctgttccagcctcagtggtgtcgaggataatgggaagaggaggatgcaacatcactgcaatacaggatgttactggtgcccatattgatgtggataaacaaaaagataagaatggcgagagaatgatcacaataaggggtggcacagaatcaacaagatatgcagttcaactaatcaatgcactcattcaagatcctgctaaggaactggaagacttgattcctaaaaatcatatcagaacacctgccagcaccaaatcaattcatgctaacttctcatctggagtaggtaccacagcagcttccagtaaaaatgcatttcctttgggtgctccaactcttgtaacttcacaggcaacaacgttatctacgttccagcccgctaataaacttaataagaatgttccaacaaatgtacgttcttctttcccagtttctctacccttagcttatcctcaccctcattttgccctgctggctgctcaaactatgcaacagattcggcatcctcgcttacccatggcccagtttggaggaaccttctcaccttctcctaacacatggggaccattcccagtgagacctgtgaatcctggcaacacaaatagctctccaaagcataataacacaagccgtctacctaaccagaacgggactgttttaccctcagagtctgctggactagctactgccagttgtcctatcactgtctcttctgtagttgctgccagtcagcaactgtgtgtcactaatacccggactccttcatcagtcagaaagcagttgtttgcctgtgtgcctaagacaagtcctccagcaacagtgatttcttctgtgacaagcacttgtagttccctgccttctgtctcctctgcacctatcactagcgggcaagctcccaccacatttctacctgcaagtacttctcaagcacagctttcttcacaaaagatggagtctttctctgctgtgccacccaccaaagagaaagtgtccacacaggaccagcccatggcaaacctatgtaccccatcttcaactgcaaacagttgcagtagctctgccagcaacaccccgggagctccagaaactcacccatccagtagtcccactcctacttccagtaacacacaagaggaggcacagccatccagtgtgtctgatttaagtcctatgtcaatgccttttgcatctaactcagaacctgctccattgactttgacatcacccagaatggttgctgctgataatcaggacaccagtaatttacctcagttagctgtaccagcacctcgagtttctcatcgaatgcagcccagaggttctttttactccatggtaccaaatgcaactattcaccaggatccccagtctatttttgttacgaatccagttactctttgggaggccgaggtgggaggatcacttgaggtcaggagtttgagaccagtctgaccaaagtggtgaaaccccgtctccactaaaaatataaaaattagccaggcatgctggcgtgggcctgtaatccctgctactcgggaggctgaggcaggagaatcacttgaacccgggaggtggaggttgcagtgagccgagattgtgccacagtactccagcctgggtgacacagcgagactctgtctc

SEQ ID NO: 18554 - protein, 619 aa, Homo sapiens
MSLAQQKADKNKINGEPRGGGAGGNSDSDNLDSTDCNSESSSGGKSQELNFVMDVNSSKYPSLLLHSQEEKTSTATSKTQTRLEGEVTPNSLSTSYKTVSLPLSSPNIKLNLTSPKRGQKREEGWKEVVRRSKKLSVPASVVSRIMGRGGCNITAIQDVTGAHIDVDKQKDKNGERMITIRGGTESTRYAVQLINALIQDPAKELEDLIPKNHIRTPASTKSIHANFSSGVGTTAASSKNAFPLGAPTLVTSQATTLSTFQPANKLNKNVPTNVRSSFPVSLPLAYPHPHFALLAAQTMQQIRHPRLPMAQFGGTFSPSPNTWGPFPVRPVNPGNTNSSPKHNNTSRLPNQNGTVLPSESAGLATASCPITVSSVVAASQQLCVTNTRTPSSVRKQLFACVPKTSPPATVISSVTSTCSSLPSVSSAPITSGQAPTTFLPASTSQAQLSSQKMESFSAVPPTKEKVSTQDQPMANLCTPSSTANSCSSSASNTPGAPETHPSSSPTPTSSNTQEEAQPSSVSDLSPMSMPFASNSEPAPLTLTSPRMVAADNQDTSNLPQLAVPAPRVSHRMQPRGSFYSMVPNATIHQDPQSIFVTNPVTLWEAEVGGSLEVRSLRPV

SEQ ID NO: 18555 - DNA, 2260 bp, Homo sapiens
  CDS (1334)..(2122)
gatgcgcctgtgccggggagggcagaacgctggtgcctggcacaggtgccacaacacatacgggtgaggacactgaaaacccctcagttcccccgactcatggccacttgtcccagtgacacagccatgctctcccactcacccacaatagggtctgaatgtgccccccagattcacagtgagaaactcattccccagagcaacagtgtagtgaggtggaacctgatgggagccccgccctcacagacaaactcctgtagctgtcaagacagcttgggcatggattcctctctgccttctgccatgtggacacgtggccttcctcccctctctcctccggggaatgcagtgtttgggcgccatcttggaagcagagatcaggcctcaccagacaccaagcctgctggcaccatgaccctggactcccaacctccacagctgggaaagaactctgctccctagaaattacccaggctcgctcaggtattctgttacagcagcaccaagagacattcactcgcttactccctcactctctaacccactcccattcaccctctcactccctctctaacccactcccattcaccctctcactccctcgctaacccactcccattcactcattcactcactcactctctagcccactttttttttgagatggagtcttgctctgttgcccaggctggagtgcagtggcgcgatctcggctcactgcaacctctgactccgattcaagctattctcctgcctcagtctcctgagtagccgggactacaggcatgcaccaccatgcccagctaattttgttttttgtttttgttttgagactcgctctgtctcccaggctgaagtgcagtggcacgatctcggctcactgcaagctccacctcccaggttcacaccattctcccgcctcagccttctgagtagctgggagtacaggcgcccgccaccacgcctggctaattttgtttttgtatttttagtagaggcagggtttcaccatgttgaccaggctgctcccgaactgctgacctcagatcatctgccctcctcggcctcccaaagtgctgggattacaggcgtgagccaccgcgcccggccctctttagcccactcattcactcactccctcgctctctaacccactcctgctcactcactcattcactggctcactcactctctaacccactctctctcattcccttgctcgttctctagcccaccctcgcacactcattcactggcccgccccttaggtgtgtgctcctgtaccaacactgaaatccagctgtcacaacaggcacccactgactccagcctcatggaaccaccattcaccaggcttgaggggaggatgtcacggcgcgctgctcccttcggtgccagccaggatggggccgggtgggtgcagctggtgaaaagaaatgcagccccccagcccctgcagaccaagccgaacagcccagctcgcgggtggatcacagggcacccagcagccgccttccctccggaagagccaagaaggcttccaagaccagaaatgcccccagtgtggctgtgcctgtccccggtgccccgccagctggggggcagcatacccaaacagatgcaccctgcccatgatggcaccccagggacccccatcctcaggaccctccagtcgttcaagctggaattggcaggtttctgcctgtataggcatcggcttcagagtctcaggtgctgcttggcaggaaaatgcagggcaggaggggctgggcctcagctcgaggctcccaggtgcagccccccactccactgcagggcccaggggggccaagaacagccacaacaacaacaaaagccaaactgggaacggaatcgtggaaaaaaccctcataggcttttgggaacttacaaagaaatgcccacatccattctactaacatggcatctactaacgtggcatctactaggatgccacaaaacagacaaatccttccacgtaaggctggacacgtgtcagggcggtgtctcaaagctgggccacaggcagcatccacggccaggccactgggtggaggagacggtgctggggaggagccggagggaggggccggggctgttcccttaggcagaacggctcacctgtggtgtgcgcacagcaggattgtggggacacaagatgcccccttcattcatcagttacttgtattctttgtatgaaacacctgccgataaaatgtgaaaaaggggcatttcctaaagt

SEQ ID NO: 18556 - protein, 263 aa, Homo sapiens; identical to SEQ ID NO: 11134

SEQ ID NO: 18557 - DNA, 2692 bp, Homo sapiens
  CDS (373)..(1494)
gcagtccagctgctctggacgctgaggccccggcttctcttgctggggtgtcgattcgggagggctgagggcgcggccgagagaacggggcggtcaccgccgccgtggcccgcgcgtcccgcgctctccttgcagtgcaggccccagccgctctcgggcgcggcgtgggggaggcggccctgcaggtgcgtacccggggtccgacacgtgcggggcttcctgcgagctgagtccccgctgcgcgtcttcaggcctttgtaagttgtcaaatttcccaccggcccagctcatcgagcttcttcccagctgtgaacaggagggcctgttccctaattcttgccgaaattgttccaactgctggtgttctgcaagatggagccaggaggagagcccacaggtgctaaagagagcagtaccctgatggagtcccttgcagctgtgaaggctgctttcctggcgcaggccccgagtggcagccggtcagccgaggtgcaggcagctcagagcacggagcctgccgcagaggcaggcgctcccgagggagagggccacagaggggggcctccccgggcgttggggtctcttggcctttgtgaaaaccaggaagccagagagaggcccggaggttcccctcgaggcccggtcacttctgagaaaactggaggacagagtggcctcgagtcagacgtccctccgaacgcaggccccggcgcagagggcgggggcagctggaaggggcggcctttcccgtgcggcgcctgtggccgcagcttcaagtgctcctcggacgcggcaaagcaccggagcatccactcgggggagaaaccgtacgagtgcagcgactgcgggaaggccttcatccacagctcgcacgtggtccggcaccagcgggcgcacagcggggagaggccctacgcgtgcgccgagtgcggcaaggccttcggccagagcttcaacctcctccggcaccagcgcgtgcacacgggcgagaagccctacgcgtgcgccgactgcggcaaggccttcggccagaggtcggacgccgccaagcaccgccgcacccacaccggggagaggctgtacgcgtgcggcgagtgcgggaagcgcttcctgcacagctcgaacgtggtccggcaccggcggacccaccacggggagaacccgtacgagtgccgggagtgcggccaggccttcagccagagctccaacctcctccagcaccagcgcgtgcacacgggggagcggcccttcgcctgccaggactgcggccgcgccttcagccgcagctccttcctccgcgagcactgccgcatccacaccggggagaagccccaccagtgcggccactgcgggcgcgcgttccgggcgctgtcgggcttcttccggcaccagcgactccacacgggcgagaagccgttccgctgcaccgagtgcggccgcgccttccgcctgagcttccacctcatccagcaccggcgggtgcatggcgccgagtgagccggggctgcggcggaagagatgccggcggcctggtgggcgcgaggccgaggccgggggaggctcctgtccgccccgtgcgcggtgaggaagtaacagccggctgcgcgcctggttctcgggttgcgaaagcctcgccaggcctgcatccgccttggcttgggagcaatcaggagagacagggctcggggaaggcgagcgctgcccgcgggaggcgattcccagaggcggggaggtctcaggggtctgtcccgggccggccgcccgcctctgagactccccgcctcccacggtcagctgctgcggggcagtggccggtgattgaatcggtcattcctccgcaaccaggcctccatcaaaaccctgcatgagatgagggcctcgggcttcgggttggtgaaggcggggtgggggggcagttaggaagggggcgcccagacagggcatggaagcctcgcgtcctcccccgtaccttgcgggtcggtggttcatccatgtatttcaacgccttttcacagccggttcatatggtcccgacttctgtgtgcttagaaaattatggaacttggccgggtgcggtggctcccgcctgtaatcctagcactttgggaggccgaggcgggcggatcacacggtcaagagatcaagaccatcctggccaacatggcaaaacccccatctcgactaaaaatacaaaaaattaattgggcgtggtggcgtgcgcctgtaatctcagctacttgggagcctggggcaggagaatcacttgaacctgggaggcggaggttgcagtgagcggagatctgggcactgtactttagcctgggcgacagagagacccatctcaaaaaaaaaaattggaacctgagaagggggtcgtggggtccccggggcccaccgtctgcacttggcatctgaagtcggggtggtcttgtgggactgaccccttaccctgtgggttctgcactagctccgggcaattggtgacagaatcgagttaaattgtaggacatcgcgttggtgtctgagagggagttggagagctggttggtgtggagggaaaggcttacacacatgtgatttcagaagcgttctgtgggtagaggaatcgttttctctttgagactgttatgagtatgtacaaatgttatttcctgtaaaatattttcattttttaaaatgttattttctagat

SEQ ID NO: 18558 - protein, 374 aa, Homo sapiens
MEPGGEPTGAKESSTLMESLAAVKAAFLAQAPSGSRSAEVQAAQSTEPAAEAGAPEGEGHRGGPPRALGSLGLCENQEARERPGGSPRGPVTSEKTGGQSGLESDVPPNAGPGAEGGGSWKGRPFPCGACGRSFKCSSDAAKHRSIHSGEKPYECSDCGKAFIHSSHVVRHQRAHSGERPYACAECGKAFGQSFNLLRHQRVHTGEKPYACADCGKAFGQRSDAAKHRRTHTGERLYACGECGKRFLHSSNVVRHRRTHHGENPYECRECGQAFSQSSNLLQHQRVHTGERPFACQDCGRAFSRSSFLREHCRIHTGEKPHQCGHCGRAFRALSGFFRHQRLHTGEKPFRCTECGRAFRLSFHLIQHRRVHGAE

SEQ ID NO: 18559 - DNA, 1924 bp, Homo sapiens
aatctgtgcctggccggagtccagggtaaattagtagcatggtgttagatgttagaaacagaactgttatttgcagtgttaggtctaggatcccagttctagtaggacagccctgcaagacaatcaaccagaagcctccaggagcttctacctatggcttattcacaactgggcaagaaaacatcattggtaagaactgctgagtgtgcccttagaaagccctagtagctccagctgtgactatatcaactgtgtgccaagtgtgactttgtacagttttatgtttccactctcctgtatgtgtagccactcgatgcctaacctaccttccacaagccagccccgcatccctgctcccgcagtgtaagtgcagagcctgcctcactggtaagggaaaaccttggcttgggaggccagccctggcccttgaaggggttggctgtgcccagcccacctggctgcagtgggcagctcatgtctgtatctccaaagtgatgtttgtttgcaaaacaccggctgaactgagctggtgttgccaactcttggcagcgctgggccaaaccgaccacataccatgagctcccaaatggcgtgtgctcactgtgagacgtcctgccacaccccacaggagacggaggcagtgggcatttggaaccaattctattcagacttcgtcaaagccaaagtcagtctggtgttgtcagttgacacatctccagagttcatgacagctcaacctctccccttgtacagaagccatttttgtaaaaccacactgacctaaattcagctgccaaacacagtctttcctattgatccgctcggcttatgttgaaaatttcaatgtcatgattacctggttggtttgggtttttgttttgttattttccattagaaatataaagatgtcaagaagcttttaaaggtcaacacaaaaaaccaaggccaggagtgaggggctctttcttaccgtaaataaggggaaaaggcagttagctcaaggacttgtgacggatccactttggtgttcaaggacctgcttatgccctcagtgccaatcggctcttggtgagatgactgtactcctaaggaaaatagccacttctgcagtctattatgcttttataactgtttaaaggtacttttctattgtcatttttaaaaaataaagtgcttattccagctgtcacaccattgcttgacaaattcttttttagcaagaccaactacatgtatcccacactgcagacaagacgccagcagatttcattcccattgtcaggcttcggcagagctaagcaagcattggccattgagcttaggcacaaagagattaaaggaggaagcagataccggggaaagccagagagtaagtctgcaaacgcacaaccacagtggctggtgacccacaatgacaccagaggcagagggacctcaagggaggcccctcatctacctcagcctacaaagcttgactcaggattatctgaattatattaaaatgtcacttgggttttctgctgacttaaatatatcttacgccaggcatggtggctcacacctgtaatcccaacactgggaaactgaggcaggaggcttgcttgatcccaggagtttgagaccagcctggacaacacagcaagaccctcaattttaacattagccaggagtactagcacctgtggtcctagctactcaggggaccacagaggaaagacaacttgagcccaagaggtcgaggctgcagtgagccatgactgctccactgcactgaagcctcggcaacagggcaagaccctgactccaaaaccataaaaaattaaaaaaaaaaaaaaagtggaaaaccaggcaccaattgccaagagaatcgtgttttatatatactctcacctactcttttttccccccaaaggagaaagaaagc

SEQ ID NO: 18560 - DNA, 1808 bp, Homo sapiens
ttcgagcggctgctcagggtcgctccgggttgtgcagctgcccgcccgggacgcaaagttctagtctggccctggatgggaagttggcgtggccgggatgccttctaactttttcccccggtggggactgacgttcctttcgagctgctggcggtgccgccgggcagcgtcgcgccccgcggtcactccccagccctggcccccaagccgggctcggcgcgcgcagcaggttgagggggcgagtgccgaggcgagcggcggtccggcgtcccccgtccctgctctccatctcgggctgaggattcgctgacgcagcaagccggccgatgccctgaggggacgcagccagggcgtgcgggggaaacgctgtgtcatcccctggggccgtcgtccctccgaggggctgccgcctgggaacccccccccagcctcttcctcgctgtgttctccgcggagggtctcccgcgcccgggcccccgcgccgccggggactggctctgggcacacccgctcaggctcttcggggcacggcgacaggggtcctttccctccgggacctcctctggggcgtcgccgactcggccctagactgcggaggcgggggtggaacgcggagcccgggcgcctggttgggcccggagaccggagccggggaggggccgctcccgcgccgcataccctcgggctcccgcgcctcccgcaccaatgagacggaatttattaggaaacaggcagagagaccgctgaagtgaaccggggcttgccaggggtgggcggcagccgaggcggccagaaaagaactttgaaggaagaaaggaaattgtgctaagagacgtctcagagaggctgtgcagctgctggaggactataagcatgggaccctgcgcccgggggtcaccaatgaacagctctggagtgcacagaaaatcaagcaggctattctacatccggacaccaatgagaagatcttcatgccatttagaatgtcaggttatattccttttgggacgccaattgtaagtgttaccttcaaaggatttccttttctaaaaaattattttaaatgtctaactttatgttattgctcacgggtatttgactgaattgttgatttaggataagtcaattcctggagggaaattaccaaataaaatgatatgtatttcttaccacatctcttgatgctgattggcaaacctcttttcataaaaagcctgatgacttaaatccagcgtggagttgaaaattgccttcttccctgcacgttttctgtccccactgttgtcattagcacctgctagtcatagggaagttttctcaaagaacttgggaagtaggagtagaagcatgccttctgaaaaatcaaagtttaaaattaattcagaaagaattttcagcattctttttgttcagttttagaatcaggattatgtttactccttatttttattggaataaaacatacagaaaggtgcattcatcataaatgtacagcttggtaaattttcaaaaagcaagcatatccagggctgggcgcggtggctcacgcctgtaatcccagcactttgggaggccaaggcaggcagatcatgaggtcagaagatcgagaccatcctggccaacacagtgaaaccccgtctctactaaaaatacaaaaaattagctgagagtggtggcgggcacctgtagtcccagctactcggaaggctgaggcaggagaatgacatgaacccgggaggcggagctttcagtgagccgagatcgcgccagtgcactccaggctgggcgacagagcgagactcggtctc

SEQ ID NO: 18561 - DNA, 2187 bp, Homo sapiens
  CDS (1451)..(1942)
acacacccgggagacaccgcgaaggcagagcagcgttctcagcacagaccttgtgggcactgcctcgctttgggactactcggagccgcatcaatggtgaataaaatccttcctgtttgcagcccttaataatcagggtcagagaccagttagaagtgttcagtgtggaaaacgggaaaccaaaagcccctctgaatcctacccaccgaggttctccccagccaaggcgaggcggccgcagtgcgagatccacaccgcagcctcggaagacaagcgggcagaaatcccatgaggggcagttggggtttgaggaaggcgaggtgaggcacctgtggcagaaaaaaaaaaaaaccgcaccacggagaagcagagcctgggtccccaacggacaaaagtgtcttcccatcagcccttgcgctgggcccaggtgaccctggcattcctggttcgagaccagggtgcgcttcaggccgctaggggtgcccaaaagcgggcagaaggcccatgaggggaaggtgatgcacctggggcagagaaaaaaaaaaaaaaaaaaaaccgcgccgcctataagcggggcctggctcccccacagaagaaactgtcctcacatcagcgcttgcgctgcgccccagggaccctggtatccctggctcgagcccagcgtgcgcctcggcctgctaggggtaccccaaggcagacagaaggcccatgagggaaaggtgagacacctggggcagagaaaaaaataaaaaaactgcgccgcccagaagtggggcctgggtcccccacagacgaacgtccctacccatcagccctgaactgggccccggagaccctagcgtccctggctcgaaaccagggtgcgcttcgggcccgctagtggtacctcaaggtgggcagaaagcccatgaggggaaggtgaggcacctggggaaaagcgaaaaaaacaaaaataaaaacgtcgcagagaagcagagcctgggtccccgaggaagaaagtgtcttcgcatcagcccttgcgctgggccccggggaccctggtgtcccagtttcgaacccagggtgtgcgtctggccactaggggtaccccaagtcggacagaaggcccatgaggggaaggtgaggtttgagggaggagacgtgaggcaactgtggcaggaaaaaaaaaaaaaaaaaacaaacacgccgcggagaagcggggcctgggtccccaacggacgaaagtgccttcccatcagcccctgcgctgggccccatggacactggcgaccctggttagagcccagggtgcgcctcgtgcccaataagggtatcccaaagcgggcagaatgctcattaggggaaggtgagacacctggggcagagaaaaaaaaaaccgcgccgcaaagaagcgggacctgggtcccccacggatgaaagtgtcttcccatcagcccctgccctgggccccatggaccctggcaaccctggttcgagccccaggtgcgcttcgcgcccgctagggttacccagaagccggcagaaggcccatgagaggaaggtaagacacctggggcaaaggaaaaaaaaaaaccgcgcttgcagaaaagcggggcctggctcctccacggacgaaggtgccttcccatcagcccctgcgctgggccctggggaacctggtgtccctggctggaaaccagggtacaccttggacccgctaggggtaccccaaggagagcagaaagcccatgaggggaaggtgaggcatctgcggcagagaaagaagaaaaaccgcgcagcggagaagcggggcctgggtcccccactgacgaaagtgtctttccgtcagcccttgagctgggtcccgaggacgctgacatccctggttcgagcccacgctgcgcctcaggctgctacgagtaccccaaggaggaaagaaggcccaaaagtttcagctgaggtttgaggcaggagagatgaggcacctgtggcagaaaaaaaaacaaacaaacaaaaaaaaaaaaacgcgcagcggagaattggtgcctgggtctcccagggacgaaagtgccttcccatcagccactgcgcttggccccatggaacctggcctccatggttcgagcccagggtgcgcctcgggccgctaggggtaccccaaagtgtgcagaaggcctatgaggggaaggtgaggcacctggggcagag

SEQ ID NO: 18562 - protein, 164 aa, Homo sapiens
MDPGNPGSSPRCASRPLGLPRSRQKAHERKVRHLGQRKKKNRACRKAGPGSSTDEGAFPSAPALGPGEPGVPGWKPGYTLDPLGVPQGEQKAHEGKVRHLRQRKKKNRAAEKRGLGPPLTKVSFRQPLSWVPRTLTSLVRAHAAPQAATSTPRRKEGPKVSAEV

SEQ ID NO: 18563 - DNA, 2359 bp, Homo sapiens
gttcctattcggccatcttggctccacctccctgtatttttctttttaaaattgcatagttgcttaaacttatttttttctctttggatttttaaaggttcactgtatgtatagtcttatatctcagtcgatcttgttagtggcttattgttaaaacatgcagtttttggctgggcatggtggctgtattcctagcactttgggaggccaaggcaggtggatcacctaagcccaggagtttgagatcagcctgggcaacctggtgaaaccctgtctctactgaatatacaaaattagctgggcatggtggcacacgcctgtagtcccagctacccaggaggctgaggcaggagaatcacttgaacccaggaggcagatgttgcagtgagctgggatagagccactccagacttagtctccaaaaaaaaaaaaaaaatttaaagaaaaaaaatgtctacaacatgcactccccaaaaatcttatctaaaactgaacttattatgttctctcctaaatcagttactcgaagttcaccgctctcctggaacctcagaatacaaatcatagtatcttaattgactcatccttttatcttatcaaacccatcatcaaatccagatcattttcctttctctgtctctaattaattcattttgttcagagttgccatgatagtctccctaatatactgtttatgtctttgccctctgtcatccaggccgatgcctctcgacaaagaatgcacatcacaatcacctggggacctctttcaaatacttgtacctgggccccattccactcccattctcactattgagtcagcagatttggaaatgggccccttttgtacttggaagagtcttaggttattgaggtgaacctttagttaagatccactaatccagatccaccctgatcatctacttgtcactcactattcaacatacttcatccagctcaattagagctatcttccagtgattctccaaatactcatccccactctcctctaataagaatgtccttccagtttctctctgcttatataaatccataccatctttcaaagtgtaagtcaagtcccatcttctctattaagtttcatgaactggtcaggggcggtggctcatgccagcactttggaaggccaaggcaggcaggtcacttgagctcaggagttcgagaccagcctaggcaacatagtgaaaccctgtctctacaaaaaatacaaaaattagccaggtgtggtggagcatgcctataatctaactacttcggaggctgaagtacgagaatcgcttgggccaggaggtggtggttgcagtgagcccagatcgcgccactacgctccagcctaggcaacagaatgagaccctgtctcagaaaaaaaaaaaaaaaactttgcatggaccacaccatactagtaacctcattctcctccaaatttctataaaactgttatatgtaataggtgtcatttggcctctgcactgtgttactaccatttaatgtctaaagcttgtattcccaataaaaccattcttttttttctctttttttctttttggaacaggctctggctctgtcacccacgctggtgtgcagtggcgccaatctgggctcactgcaacctcagcactcaagccatcttcccacctcagcttcccgagtaaccgggactacaggtgcctgccaccacatccagctaatttttgggtttttgttgttgttgttttgctagagagggtgttttgccatgttgcccaggctggtctcacatcccgggctcaagcaatccgcccacctcggcctcccaaagtgctgggattacaggcatgagccaccacacctggccaccttctcaataaggattgtgtgttttcatgatctcttaacaatacccagcaatgttgtgcacatgggaagaatgcttatcttacaaataaaatattatgaaaaacattcttgaggtgacaggtatgctaagtaccctaatttgatcattacacattgtatacacgtatcaaaatatcacattgcatcccacacatgcataattattaaataaaattgaaggccgggcacagtggctcacgcctgtaatcccagcacttttggaggccgaggcgggcggatcacgaggtcaggagatcgagaccatcctggctaacacggtgaaaccccatctctactaaaaatacaaaaaaaaaattagccgggcgcggtggcgggcgcctgtagtcccagctactcgggaggctgaggcaggagaatggcgtgaacccaggaggcggagcttgcactgagccgagatcatgccactgcactgcagcctggtgacagggcaagactccgtctc

SEQ ID NO: 18564 - DNA, 1727 bp, Homo sapiens
cagtaactctatagagaaataaagggttttcccaatcctggaaaaaaatggttaaaattgtaaatcttacatatattttaccatagtaaaaaatgaattaggctgggcccatggctcacgcctacaatcccagcactttgggaggctgaggcaggcaaatcgtttgaggccaggagttcaaaaccagcctggccaacatggcaaaactcatctctactaaaaatacaaagaaaatagccaggcatggtggcacacacctgtaatcccagctactcaggaggctgaggcatgagaattgcttggacctggaaggcagacattggagtgagctgagatcttcccactgcactccagcctgggtgacatagctagactgtctcaaaaaaaaaaaaaaaagaatgaacacttaaatatttgtggcagatagaggtgttatttgcatatggaagaaaattgctttagaaatgaaatttctgattactgaaactaaagagaaagtatctcttcttatcatggtaccaagcttgagggtgcataagtcacctatagacgtaataagcattgagtttcattttttgtttgtttttgagacaggttctcactgttacccagcctggagtgcagtggtacaattgtagctcactgcagcctggacctcctgggatcaagggattcccccaacctcggcctcccaagtagctgggactatagaaatgcaacaccatgcccagataatttaattttttttttttttttttttttttgtagagacaggggtttctctttgtcacccaggctggcctcaaactcctgggctcaagcagtcttcccacctttccctcccaaagtgctgggattacaggcgtgagccactgcatcctgccgagaaaatcattttttatttaaataatgtcaaatggaagtatgtagcacccccccccaccttcttttcccctttctttcctctttgagtctgctgtcattccctttttcatgagttttctctgctccccaaataggctaaacaataaccgtaaagtgagattagagaaaataagaatggagtagatgatggaattcaaaatagctgtctacattcttcactgagaaagatagctttgagttaaaggtgagaggagcaaatctggggaaaaacgggtgaaacggcatgatttaagtagcataccagatgcgtttctgcatggcatggctcttgcttgatgaataatgttctgtatagtagaagaggaaaatacagtgagtgaaggagctggcagaaggtgggctgggggagttggggaagagtgaaatgagtatggagaggtgagagagctgactgcaaaggcatgtggggtgtggattttaaaaggaaagccctgaggtggaaatcactaacatggtgcctggctacaagcagagggagctcaggacttgactgtgctgggggtggcctgcccttttgtagtgcagttgaggagagctcaggggctgtcagaatgctgtgtgggaaggtggaggatgaaagaggacctgggagcagcaactttgttctggtttgttgttttctcttccctacctcgtatgtactcccactcaggaaaagatcctgagacctctctgtaccagatcctcttatacccaggttctccttaatcccaatcaactttaatctataaagttacgatttgtttacttataaatttatttttaataaagttgtgaaaccg

SEQ ID NO: 18565 - DNA, 1784 bp, Homo sapiens
tgttatttttattgttgtaatgttactttattttctaatattttctgtttgcggttggttgaatcctcagctgtggaacctacagatacagaaccacagatttggagggccacattgtatatgtactattttgtgacttattttgaatatttctgcatcattaagtattcattattttttctagactataacttgctttgtctactgtgtaaatatgccatgatttatttgtagttaattttttacagttaataacactaggatgaactgttagcctattagccaatctttgactatctctggcttgaaacagcatatcacttatatttgtttggagtagatagagcaaaaagtaaagaaatgattattattaaataggacatatcccatttatcagcagatggttacagtagttcagactcttttacttctgacccagaacagatcgggagcaatgtaactcgtcaaaggtcagtatttctgtcaatgaaaagcatgttaaactatcttgctgcgttttaatgtttaaaactatttagaaccaagcacaaatgattttgttctctgaaagctgttaggttactttttgatttatgtaaaagacaagtaattttgatcctttccaacttgaatagaaaaacaaaaagaaccctgactttctaaatggtatgttgtggaagctctaaaaagaggtgataacttcttgacgatagaagttttataagtcctttttgtacctaaacaacgagaatctgtcaagtaatacatgtatagccttatggtaagtaccaaaagaattctgtgttttaaaacaccatccaaaagcacagcccagtggtgggccacctccccaccctgaagttctgcgttacatataacctttcaggcacaaacaagaagggtgtgggatagggtggaggaggctagagatttgtctgcaagggctttaccatccactaaaagctgtgtgcaggacagaagcatctttctctcctcactttttgcacgtgttgagtatcattttgctgtgtgcccagtggatgtagcgaggatgcagaatctccaagcagcttagagtcagaaggctgcttgtcttcctttctgattcttcatgtagttcttcctgtgtttcttagcattctcagtcatcttggattttactctgctgtttattcccatatatgcagatcagattaccagaggccttggagactcttttcagaatatgaaagactttggtagcaaagaagtgaatctctagggcgagttgagtttgagcatagtcacctctaaaatgagatggcctctgcggacacatgaaagggtacttcagcttaccaaaatccagaacttaataggttgaaagctaaccatatctgaaagtagactttcctttatacaattattttttttcagactattattacttttaattgaatgggaaagcgtaacactaagtatgcagtctattatgaaatcatgttgacaactaagtttcttttcaaaatttttgaggccgagcacttctgtaatcctagcactttgggaggctaaggtgggcggatcacctgaagtcaggagttcgagaccagcctggccaacatggtgaaactccgtctctactaaaaatacaaaaattagccgggcatggtagcatgcgcctgtaatcccagttacttgggaggctgaagcaggagaatcgcttgaacccaggaggcggaggttgcagtgagccaaaatggtgtcactgcactccagcctgggcaacagagtgagactgtctc

SEQ ID NO: 18566 - DNA, 1812 bp, Homo sapiens
agtgaaagggaagattgggagggaaggggtaggagataagaatatctaagcaaggctgacattgtggggaccatcaaatactatacttagttcagttacagatagctatggaattgaaagtttctcagggaaaagggaaaaagatgtaccaaaggaaataaccaaagtatagaaaagaatgttctttgaaatgaggagaaaaaagatgagtttttgagagtgtatagaaagaaaagtagcaaggttttaggcaaggttaaatactagaagttagaaataaatcaaaatctaaaaaggcatatataaagtataagtgtaatgagaaaattgagcagtttcatttttgttgtttattagtgtcaacagaatttgaaataattttcaagctgattttattcattgtttacctccttaattatataatagaaataagtagcttgtgtttcttatgaaaatttacctgctacttgatgtatcttttttcagtgcacggtagtaaaatcagttgtatatatcctgtctaacatcagtatgcatattatactatactgtacatttaattaggagtttattagctgttggcttaaatgagtttaaaactactttatgatcacatttggctcaatgaatttggatttgagactaatctttacatacccaagatgataatgttacttgtctgtcttagaagtaaagacaccaatattcttcttaccttccttttttatatcctatttccttatctaacatctctaatatgtaccctagtacaattttcaagtattttgttttttttttaatgttcagtgtacttactttttcgtaaatactgctttctttctattaaatatagtccttatctgacaaaaagtccgtcagaagtagagcttatctttaggccaggcacggtagctcacaactgtaatcccagcacattgggaggctaaggcgggcggatggctttgagcccaagagttcgagactagcctgagcaacatggcgaaaacccatctctactaaaaatacaaaaactagctgggcatggtggcgcgtgtctgtggtctcagctgctcgggaggctgaggtaggagtgtggcttgagcccaggagacggaggttacagtgagttgagatcacgccattgcactccagcctgggtgacagagccagaccttgtctcaaaaaaaaaaaaaaaaaaaaaaaaaaaaaacagtagagctcatcttttcttgaagagtcatttaaaatcagtaagtaaaaacttgctagatttgatgattgtgtgccatgagttacacacagactcctaaatcagtttcacctgtggtgtcctcattctgtttactttgagcattttgcattctatatctgcttagttatatggatttattcgtcccatataatatgtgtggccacatggacacatgttctaaaaggttttaaattctgcaagatagtgacgatgatgtaaacacaagaaaagggcaaatggatacattttcctactctgtgctcatcaaacatattacaggataaaattattggctatctaataaaaacacagactaataagacctgataagttggacaaaatgtttaaaaattaacatgaagatgataggaagtatgaatctatattcactgtcattaatgtcaaacctttaccttatggtatattgtactttgagaaattatggccaggcatggtggctcacacctataatcctagcactttgggaggctgagacaggaggatctcttgagcccaggagttcgagaccagcctgggcaacacagggagacactgtcttt

SEQ ID NO: 18567 - DNA, 2526 bp, Homo sapiens
  CDS (1843)..(2175)
aagcgaccagattgcccagcgcctggagaatgggctgcagccagagagagcataggaggatgttgttctctgtacactgtctctaaaaatggtgctttttggctgggcacggtggctcatgcctgtaatcccagcactttggaaggctgcggcgggcagatcacttgcggtcaggagttcgagacctgcctgatgatcatggagaaaccccatctctactaaaaattcaaaattagccgggtgtggtggtgtggtgggcacctgtaatcccagctacttgggaggctgaggcagaagaatcgtttgaacccgggaggcagaggttgcagtgaactgagatcgtgccattgcactccagcctgggcaacaagagtgaaactccatctcaaaaaaaacaaacaagcaaaaaaatgatgccttttagcaaaatagtgactgactggcttttaataccacaataaaaagacattagcaaaagtggtgtgagagcatgatcatgagtcctgtagagaaagtaaccaaaagtgatacatttctatgtggttccctcccagacaaaatgccaggctccacccactagttcaccctccctgttagcaatggctggtacgtgttcaggtttagattggtgccagacactttattttattgtctcaccgagtctccatgaccaacctacgagctatgagatattactaccccttttttggatagacacagaggtgaatagcttgcccatggacacacatctactaagtggtaaaactggaaatcgaacccaggcagtctttccccagaggccagttcatcaccatgcagtgctgatgttgggacctaatggtggttctgcttgtggcctgtgttgaaatgttttatctttattcagagaaaacagaaggcatgatgtggctttaagcaggtggtgacatggtcagattgcatttcccctcaatttacatggataatggacagttgacaaagacatcatcacccccatgagatgataaaccagtccatgaaaccggaaaacaggaaaccattgaaatttgttaaatgatatttcagtggaactttggggataatatactaggcataatatcattattgtgatggaggctgattgagtgaattcactcgatggagctgctgttagaaaattgtcctgctccagggactcaagtgctcaaccagactcctgcgaagcctgaataaagctcccacctcctatattctctgggatgagaaacaagaatgttctcggaactgtttggaaattgtgagttctgtatacaggtagcctacctccaatctagagaaattcataaattgccaaaagccctggactcatccagaatcattatcattgccaacattaaagtcctatgttttaagcatctgtgatttcatggtacttggtacatggaaccatgtgaacgaaaaggacacagatcctctttgaactgatactgacgtatttcatagccaaatcaccacgtgttgagttcccattctacaccatgcggtatttcatgtaaccctcaagaatggccaaggaaagtggattccccatcattagaggtaaggaaatgaagaccaagggagtctaaataatgggcccaaagtctcacagtgggctagagagagagtatgggattagacccaaagtcttcttggctccaaagcaggtgccctgtgctgctccctctaaagatacatcagtgagagtttacgcctgttgtccatgatgcattgaccagagtagaaaaaggatcctttgtcttgcaggcagtctggttgccagttggctgccaaaattcagatgttggtggaagaagccacattatgtacagtctttgctccctttcctttctcattgaaataagtaaagattcagccgcagggctgtctacccaaagtgctccgaagacttcaaggcattcactcgcctccatttcaggcaggcagagcccactgaggttgatttttttgtgttcacagctgcagaaccaggagttgctgagggcaatgatgaagaaggccgagctggaaatcagtggcaaagtgatggaaacaatgaagagactgggggatcccgtgcagcgacagcgcgtcctagtggagcaagagagacaaaaatatcttcatgaggaagagaagatcgtcaagaagttgtggtgagtgccagtcacttgcatgttgagctgtttcacctgcaaaggaaaattatcattactaagaaggaggtccttcccagttggtggtcttgccctctctttattgagcacctactgtgtaaaagttagagttctgctgatgctggtatatgtggacacttcagcacctgtccatggaggcccaggaaattcagtggccctcaggtgactgaatttctttaaaagttgcggcattgctgggcatggtagttcacacctgtagtcccagttactcatgaggctgaggcgggaggattgcttgagtccaggagttcgagaccagcctgggtaacacagggagatcctgtctctt

SEQ ID NO: 18568 - protein, 111 aa, Homo sapiens
MYSLCSLSFLIEISKDSAAGLSTQSAPKTSRHSLASISGRQSPLRLIFLCSQLQNQELLRAMMKKAELEISGKVMETMKRLGDPVQRQRVLVEQERQKYLHEEEKIVKKLW

SEQ ID NO: 18569 - DNA, 3454 bp, Homo sapiens
tacttaaattaacttgggtggttaataaagatgtaaatattcttcatccagtctataagaagagccaggaaccaaaaaaagatagcatatcttattttcatctctcagattcaccttatatttcaagagtctgagttgaatattatgttctcatttgtttctcattctagaacaataaaagaaaaagaagcaagtccaagcagcatcaaggcaacaaagatgctaaagacaaggtggagaggcctgaggcagggcccctgcagccgcagccaccacagattcaaaacggccccatgaatggctgcgagaaggacagctcgtccacagattctgctaacgaaaaaccagcccttatccctcgtgagaaaaagatctcgatacttgaggaaccttcaaaggcacttcgtggggtcacaggtcagtaatgcttaagtaaaattgcttaggaaggcatagatgaaaagagcacaaagggagctcattggggctgctgttgatgttgttgaaaatggaaggttgtttttctgcagtgtgtacgattcagccttcctgaagccaggattgggggtgaaggggaatgtaacagggcagagaataaatgctcaatctagctctacaccaagtcagaggatttttttttttttttttttgagtctgggtcttgctgtgcaaggctagagtgcagtggtgtggtcatagctcactgcagctgcagtcttgaactcctggactcaagcaatcctgccttggcatcccaaagtgctgggattacagacatgagccaccacacttagccagtcagaggtcttttttaatggaaattccagtttaaagaaatattctatatagacacatttgctagaattcacctggggtaatgaaggaatagttgatgacaaaaagaaatgttattcaatgttttctttagaaagggcagaccaaattattttaactgctggtattttttatatgatgtgacagaacataatcttccagggtgttagaatctggaacattaattatttgtgctatagctatatatttattactcttcaaaaggccacttcctaatccactgtttgactttgggcacatcatctactctagggtcccatttcctttctgaaaaataaggaaactgcattggaatctactagatcagtgcttctcaatactatctgacccaatgccccatttttagaacaaatgttaaaataaatctcatgaataatataacctacctagaaacagaatttcaataaataaaaatataagacattcaggaaaaactaaaatagaaggctcaataaagaggccagatttttacacccacttataatgaatcactttgcaattaaatgaagtaaggcagtagtcagctggatattgtggatactgttttacatttgacatgtacagtaagagctcaatacgtatatttgtatataacatggaatcactgtgaatgcacctgctacaaatgcagtccaatttagggtaatgggtgtcagctctaatatcatggctgctgatgtggttttccacatggccaaaaattcttagtcaagttctaaacatcataaagtaccatcttcctttaatttatgcaatagttgaatcttggaaatccaaacaaatgttgtaaatccgtagtaaaactgtctagactcacataattatatatatatttttttaaaatcatgaatgtccaggggaacatgagaaagttcaggacacagattaattctttgttgtgtatgacattcccaggattgcaagtcatctagcatcctgccccccaaccccaccgccaacacacacacacacaatcattttgctaatttttaaaaatgcccgctcagtttttcagaatgcctcctaaaaggtggtagatcctttgatgagaatcactacactagttgacccccaaagtccttctagttataaaatcatgagtttgtagaatcagtggcgttttaaactcccgttatattcagagcactgtgctagatgccacagtagattcagagaaggatatgatatggtctaggccctgatggaatcacattctgatatccttgaagagaaggctataggttcactggtgagtttaaggtttggggaagagaggtgcagtatccgactgagtgctcctgggagatttcctgggagcattgggtattgaaggaccaatagaactgaggtggtaaaaaggatttggagggttagagagaagtaaagagaactttactgagtgccctcaggtattgcacacctgctatatatgacacactgctattctctgacaaaccaaagatgagtaagacacatccatgcctaagaaaagtttagactaccagaagagatggaggtgcaaacagaaaagcaaatggtgacatgtaccaaatcagggtggcagtgagaaggcattaaataactggcacactctgtaatacactagtaagttcttaaattgctcacaaagcacaaattttcttccagaaacacatttcctaacaactccactaatagtgctgaaactcatgtcatccttactcacttcatgatggtttcctaaaaccgaacaatgacaacaacaaaaataacctatttcattttgaatctgaattctccagaaatttttttaattcaattttcactgtgcctacaattttgagactgttttgatttatagtcagagcaagagaaagaaattaaataatcgagtggcagattcccaacttgttattgctttcacatgaattactttcaaaatccaattactcaagttgccattttgatatcaatcatagactaaaagcttagcatatatattttttcatttacttataatttataccttctttataaaacaatgtcagtaactctgtcaagtatatgacattaaagcaaatgcaatatagaagtgcctcccttcccagtggacagctgccttgaaagttaagtacccaccaggggaatgggtacaagggggcttttggaaaccctcacatgaaactttctgtgaagaattatttcttgcacagtgatcccattctcccttctgttttttaagtatagcatgaaggcattgaggtgtgttggtattatttgttaatgttactgattcattacaaatgtctgtgcaataaatttttctgttaaagagtaaatgagccaggcttggtgactcacacttgtcatcccagcgctttgggaggctgaggcgggaggattgtttgagcccagcagtccaagaccagcctgggcaacatggcaaaaccccatctctacaaataatacaaaaattagctgggcctggtggtgcatgcctgtactcccagctacctgggaggctgaggtgggagaatcacctgagcccaggaggttgaggcttcagtgaactgtgatcgtgccactgcactccagcctggacagcagagtgagactcctc

SEQ ID NO: 18570 - DNA, 3417 bp, Homo sapiens
tttcattttagttttttaaatttctttttagaggcggggtctcactgtgttttgcccaggctggtctcgaactcctcctggtctcaagcaatcctctcgcctctgcctccccaagtgttgggattataggcatgagctactgcactcagcccaccatttgttttaaaaagggtggatcctatttgtataaaaagccatgggcattttctgtgtacttgtctacacattaatttccaggctgggcgtggtggctcacgcttgtaatcccagcactttgggaggccaaggggaggcagatcatgaggttaggagatcgaaaccatcctggctaacacggtgaaaccccgtctctactaaaaatacaaaaacaaaattagcagggtgttgtggcgggcgcctgtagtcccagctactcaggaggctgaggcaggagaatggcatgaacccgggaggtggagcttgcagtgagctgagattgcgccactgccctccagcctggacaacagagtgaggctccgtcttaaaggaaaaaaatttctggaatgatgtccaataaatcagagagagggactagaagactaatgaggacagaagcttttattcttaacacctatattttgctaccatttatattgtcatcatatgcatataacattttaacatttaaaaactagtttaaacagaaatggttgccctggaatgtggcctgtgttctttcaagggaggccagcagtttctacagtggctgagatggtaccttcatctcacacacctacgcaggagtgcatttgtgctttgatgtggttgtcccttgaagaaggaagcagttctctttttcttttttcccttttccattataggatcagtcacttcttggggcattagtagtctcatttccagcggcatcttcccttggcaaaaggaatcccagataggacctcatctttctaaacaaatgctgttttgggtcctaaccatcccatgtttggtttgaatatgtttaagttgcctggaattatcaacaaaagaattaaatttattgtaggtcagggcatcttttgactcattgtataaaacattcactttaaatgtataccgaaatgtcctttaggccgggcgcagtggctcatgcctgtaatcccagcactttgggaggccaaggcaggtggatcacctgaggtcaggagttcaagaccagcctggccaacatggtgaaatcccgtctctactaaaaatataaaaattagccgggcatggtggcgggtgcctgtaatcccagctactaggggggctgagacaggagaatcgcttgaacttgggaggcggaggttgcagtgagccgagatcactccactgccctccagcctgggcaacaaagcaagactccatctcaaaaaaaaaaaaaaaaaaaaaaaaaaaatgtccctcatacctaaaccttacctcttgctaatttgctgagggttcattttagataaaaggtgtttaggttttcatattatgtttgtaactgtatagctatgattcagtttcctaaatgaaaaaagaaactgttttaatgtacagactatttagatttgaaaagactgtgagagctttttcttttatagcaagacaagtcaagaatagaaggcacactgcgagagggatgtcttttgaaagaaaagaaacactactttttatattctcaaatcactgaagaaagctttagacataatttcaaacactagctcctgtttaattcagatgcacagaatgcattaaaaccacgagtgtagtggacgtgatttatacattctcttagcacaaatcagtacctatcttcactgtaattagacttttcttcctttctccttctcaaaagctacttttgaaaccttatgttttccctggacatattttctgtacttcataaaatagctcagttctgcaaccaactgcaaatatttgcaaaagggaacaaatgtaaaataaacgtcccctaatgcagtgtttggtgaagaaacatatgtctgacattagttggttaacctgaaaaatagtaagaaacaactctacttaggggaaagggggtagaattgagcccgtactgtgcaaatcaagagaaagctataatttacgcaatttttattaaagagaatacaagtgctgtaggcttggggtggtgctaggtcatatttaagcctaattgagctttttctatatcattagaaaaatgggccaagtttcctatattatagggtaaatacaacattttcttcctgcaaatattaaataccactggctttttaagacgtaaacatccaaatctcaaatgtctttattcatgccaatgcaatacaataaaaatattccccatatacacttaaatcactgcaagtaagccttagaatccccacaagtattattacttactatatctcagaaactttcacacacattatttcaaatacagttctcccaaaaaaaccctgcggagagatacctgtaaaccaaggctgagactagcctagacagttggttctttagacaacaggagtggagatttgaacccagctattgtgactcaagcaagcctagggcatgtttctgagatctctaaggtgtgcgctgtgaaaccggtggctcattttatgggttggatttccaaacacgactatcacaatcatgccaggaatcaatgactgacttcttgcctccgtggcctgaagttctcctctgcacctcctacctttttgccatttcagtgatgcaccaaagggtggagttgaagaacatcagttttgctgctgcttgttggcaatactctcaaaaaggcgtggggagggagagatgtaactcacccctgaagtcaagcctggagattacttgtcaggagtgtcaaaagcatttgttaagcaaccttcttcctggcattttaagaagaaagccgcatacatagatcaaatcccttccttcagaaacctgtactctctgaacagagccttggaattcagcctagagaaagaatacttggtggttcatagaacttggttcacaaaagagtgcttgctgcccacgcattttgcacaatgactcccaaacacacagaatgcacattggcaacaattttacgcgtgtttccaaaagtgctgactggaattgaagggacacatttggcacttttttttttgaaatggggtctcactccagcctgggcgacagagtgagactatgtctcaaaaaaattaaattaaaattaaaattgagcctgatgtggtggcacatgcctgtagttccagctatgcaggaagttaagatgggaggatcccttgagcttgggagatcaaggctgcagtgagctgtgattgtaactactgcattctagcctaagaaacagaaagagacactgtctcaaaaaaaaaaaaaaaaaacaag

SEQ ID NO: 18571 - DNA, 2011 bp, Homo sapiens
  CDS (690)..(1781)
aaagtgagtccagggcccgcctcccggggagtcggcctcggatgtccggaggctcctaggctgagccggcgacagagcccgggaaggcagcgagacgtgggcgccggcccagccccctcccgcgtccttcagccccaagccccgagcccctctgacccttccgcagccctccctccagccgcgcccggcctccggcagctccctgtacgcctccctccccctgcccgcccctccctcccacagccgcccatgacgccctctcggcaccccttcccactctgccacgcgtccttttcctgcaccttcgccccgcgtacctactcctgccccgccctgccattcctctcccctcccttctctctgcgacccctccctgttaggccccagcctcttctcccctcacaggtcttctctgtcctggcctcaccgccttatcctattcctctcccttgccctgtgtcttgtctcagagccccctcggggtgggagtaggttgtggagcagcacaactgggctcaccccaaagcagaacttctcaatccatgaggacaatggggaggcctttaggccagcccacatgtgacaatggagggctgcggcttccttgcggagagcacaagtgagctcactgccctggactccagggaatcagagttctggccgcggggtgacccagctcctctgctaccatgaatagggcccctctgaagcggtccaggatcctgcacatggcgctgaccggggcctcagacccctctgcagaggcagaggccaacggggagaagccctttctgctgcgggcattgcagatcgcgctggtggtctccctctactgggtcacctccatctccatggtgttccttaataagtacctgctggacagcccctccctgcggctggacacccccatcttcgtcaccttctaccagtgcctggtgaccacgctgctgtgcaaaggcctcagcgctctggccgcctgctgccctggtgccgtggacttccccagcttgcgcctggacctcagggtggcccgcagcgtcctgcccctgtcggtggtcttcatcggcatgatcaccttcaataacctctgcctcaagtacgtcggtgtggccttctacaatgtgggccgctcactcaccaccgtcttcaacgtgctgctctcctacctgctgctcaagcagaccacctccttctatgccctgctcacctgcggtatcatcatcgggggcttctggcttggtgtggaccaggagggggcagaaggcaccctgtcgtggctgggcaccgtcttcggcgtgctggctagcctctgtgtctcgctcaacgccatctacaccacgaaggtgctcccggcggtggacggcagcatctggcgcctgactttctacaacaacgtcaacgcctgcatcctcttcctgcccctgctcctgctgctcggggagcttcaggccctgcgtgactttgcccagctgggcagtgcccacttctgggggatgatgacgctgggcggcctgtttggctttgccatcggctacgtgacaggactgcagatcaagttcaccagtccgctgacccacaatgtgtcgggcacggccaaggcctgtgcccagacagtgctggccgtgctctactacgaggagaccaagagcttcctctggtggacgagcaacatgatggtgctgggcggctcctccgcctacacctgggtcaggggctgggagatgaagaagactccggaggagcccagccccaaagacagcgagaagagcgccatgggggtgtgagcaccacaggcaccctggatggcccggccccggggcccgtacacaggcggggccagcacagtagtgaaggcggtctcctggaccccagaagcgtgctgtggtgtggactgggtgctacttatagacccaatcagaatacggtggttgagaaggaaccagtgtttacaagtaatatcagaaagttgaaggaaccagtgtttacaagtaataccagaaagttgccaaac

SEQ ID NO: 18572 - protein, 364 aa, Homo sapiens
MNRAPLKRSRILHMALTGASDPSAEAEANGEKPFLLRALQIALVVSLYWVTSISMVFLNKYLLDSPSLRLDTPIFVTFYQCLVTTLLCKGLSALAACCPGAVDFPSLRLDLRVARSVLPLSVVFIGMITFNNLCLKYVGVAFYNVGRSLTTVFNVLLSYLLLKQTTSFYALLTCGIIIGGFWLGVDQEGAEGTLSWLGTVFGVLASLCVSLNAIYTTKVLPAVDGSIWRLTFYNNVNACILFLPLLLLLGELQALRDFAQLGSAHFWGMMTLGGLFGFAIGYVTGLQIKFTSPLTHNVSGTAKACAQTVLAVLYYEETKSFLWWTSNMMVLGGSSAYTWVRGWEMKKTPEEPSPKDSEKSAMGV

SEQ ID NO: 18573 - DNA, 3027 bp, Homo sapiens
  CDS (1801)..(2814)
gtgtgttgggggtggtgagaatgcgctctcttcggcccgccccgtcctttccaaagaaacgtgctcataatggggtgacctaattacatcgcaatggaactcaatcttagccactccgcagcaccgggtttcataacagactcggcggcctcgagtgctgggaagaaacgtgcgagggccgaggggggcggcggagcccgcgtggaaatcggaaagaagcgcagccctgcgacttccgcctgggtcatcacgccagcagtcgggccaaggcgcagggggcgggtgggggacacgttaactttttatttgggtgggcggcatccaaacctaacagtatatattttatcattttcaagggagtcatgctccattgcgggcccttcggtttcgtggctcccatgtccccctctccacctcccgccaaaacggcgcagcgtgacaagccatatgttccactccggtgggggcgagagagaagcaacaataagttaaaagtgccgcctccctccacctctttaccttcattcttaccaaagtaaccttttttcattgttctagagtcttgaggtgtgtgtggggaggatggaggaggagggagggttgtggcgccgcccagaattcggagcgcgcgtggaaagtagtgagttgctcggtgggctttttctgggaggaaggggcattcaggaaggattagggttttcttgactaaaaagtttaaagattggatgcgtgaaaagaaacggcacgcctaggcctggtaaaacaaacaatcgtcccgggttgtggtctttttttgcggcgccccccacccgcccacacccggagagcgccggctgcaaagcgagcgcgagtgtcgacgcgtgcgacgcactaaattgtgccgcgctcgcgcccgccagaccatgtcctcctggggaaaaagtttccctagtccccccagcaccgcgccccaccctacgccccgctggaaaaaaaaacagcaacataaaatcctaggcttgaacattctgtgcgtcccaaatttctaatgtcctcggcctgcccggtttgccgaagggagccgagtgtcgaagagaagtcgggaaaaggtaagttgtgcagacacttggggaagtttcaaggagaccgccagctcaagatggaaaccgcggcccgggcgctaagaacgggcttcagctcccgctggcaaaaagagaaagtcgagcccgccttcctgcccaacaaaaaacaacaacatgacaacaagaaccccggagggagtggaatgagtgacgtcacagccgcgctctgaggctgacaaaggagggggcgcgcccctcccgctctgcgcccgcgcggccccggagagggggcgcctgaagcgccgggtagggaagtcagccgacttgaaacttttcctcttaaagaaaaaaaaaaaaaagttgtgcgcggctcacagtggggtttttttttttccgccttcttttctcgtctcccctcccccttcttccttttgaaagtttcttctcctccccctgccccccctccccgcctgaccgcatggctgattcaactccagtgtcaatcaacttctttttcctcctcttcctcatttaaataagtttaaagctcctcctccccccggcccaccaaatctgaactttataaattgggctttgcgcgccccagcccggagtcagaaaggcgaggggcgccgggaactggcgtgtgggactccagacaggagaggctgcgccttccccgcaccgggaccttcgcgacacaccagatcctcgcccctggctcgcgcgaacgcacaggatgaccaccaccctcgtgtctgccaccatcttcgacttgagcgaagttttatgcaagggtaacaagatgctcaactatagtgctcccagtgcagggggttgcctgctggacagaaaggcagtgggcacccctgctggtgggggcttccctcggaggcactcagtcaccctgcccagctccaagttccaccagaaccagctcctcagcagcctcaagggtgagccagcccccgctctgagctcgcgggacagccgcttccgagaccgctccttctcggaagggggcgagcggctgctgcccacccggaagcagcccgggggcggccaggtcaactccagccgctacaagacggagctgtgccgcccctttgaggaaaacggtgcctgtaagtacggggacaagtgccagttcgcacacggcatccacgagctccgcagcctgacccgccaccccaagtacaagacggagctgtgccgcaccttccacaccatcggcttttgcccctacgggccccgctgccacttcatccacaacgctgaagagcgccgtgccctggccggggcccgggacctctccgctgaccgtccccgcctccagcatagctttagctttgctgggtttcccagtgccgctgccaccgccgctgccaccgggctgctggacagccccacgtccatcaccccaccccctattctgagcgccgatgacctcctgggctcacctaccctgcccgatggcaccaataacccttttgccttctccagccaggagctggcaagcctctttgcccctagcatggggctgcccgggggtggctccccgaccaccttcctcttccggcccatgtccgagtcccctcacatgtttgactctccccccagccctcaggactctctctcggaccaggagggctacctgagcagctccagcagcagccacagtggctcagactccccgaccttggacaactcaagacgcctgcccatcttcagcagactttccatctcagatgactaagccagggtctgcaggaaggaaggctgaaaaagcggacgaagattttgacttaagtgggactttgtgatttaattttttcttttttttaagtggggaggaaggggaagctagatggactaggagagacttgattttggtgctaaagttccccagttcatatgtgacatctttttaaaaaaaataacaacaaaaaaaaatgagagaaaagct

SEQ ID NO: 18574 - protein, 338 aa, Homo sapiens [sequence omitted]

SEQ ID NO: 18575 - DNA, 2584 bp, Homo sapiens
  CDS (2170)..(2529)
cttttagtgagagtaactgccaaaatatcaaaagatcctttaattatcaggtatttgaatccaggagttctctgcttaaaaagaataccagttaccagactattgtatgagtatttaaaaaatcaggaaaagcagcaaaaacagatttcaaagttattatattcattttaaaaaagtagattcttgaaattaatattagtggaaagcaatatttcaaactacacccatttcatttatagtatatgacgaattatgtagccacggctggccttagggaaacttggggcgtaggtagttctttctggtgttctgcttggctgtgttgtcaggaggtttctttttctcagtctcctagggttgcccacggctttctgtcagtctggtggcttacaaggcttcacactctctatcctcttccagaaccaagcctttctctttcctccctttcttttaatatataacatctgcatctagaaaaatgtccttgcatttgatagcacaatagattaaatgagatacaaattggaaataaacaggtagtcttggtgggaaactctttttaggtaggagtatcattcccagggccttagatcaagatctagaagctataaagggttatagtggtgttgtagaactttgtctttagttgagctaaaaacggggttctcgtcacacaaccatgacaaattaggctcacagacactttgaagggtgaccaggacagggtttattggatgaaaagggaaagaaggactatcagcaaagcgagaagccggctagccagttttccacctcgcacactgaattccaggttactatgctgcaacaggagaggccaggctcctccccactgcaaaaggcgtgaacttcctgaggctccaccccagtgcgcattcctcccagtgctcaggcctgtgggagcttctgccagggagccctttttacttggctgtctcagtagtagtgacagtgatgttaatagtatgttcgtggttcctcaagcacactagcattttccttagatagagccctcgtaatattttctctccttgaaacactaacctattctccttttgccattgtcccgtgtgcctcgcggtattagcattgtggacactgaaacctagtctaaactagcacaagcaaagggattttcttgactcacaaaatgaaagtccaggagcatattaggccttaagcacagatagatccagggctgaaaccatgtctcatgtcagcaggacactcttactatcttaaaatctcaactctgattttctctcttctcatctcattccttttctttttctaacatttattttaagttctggggtacaagtgcaggtttgttacacaggtaaacttttgtaacggaggtctgttgtacagattatttcatagcccaggtattaagcctcgtgcccattaggtgtttttactgatcctctccctccttccatgctccaccctccaaaaggccccagtgcgtgttgttgccctctatgtgtccgtgtgttttcatcatttaactcccacttataagtgaaaacatgttaagtatttcatgttagtttgctcaggataatggcttccaactccatccatgtccctgcaaaggacataatgtcgttcttttttattggcctaattcttaggcagtcttttctggaattgtgacagaaaaggttcaaagcagttatttttttttcatattatatccatagttgtgtttttattgcaaagagcacgcctcttactggatacctcctatcactattgatagggaaataaggtcatctcattgactagcgatgaagcctgttaggttaccccctgtttggagtaggcagagggatcagttcacaagaatcttttggagcagattcattttaaaacataaaaaattatgttaatagaaaggtgaacaaaaagcatatttgagaggcaaaactatggctactactgtttgtgacaaaaattatcaaaagttatacttacatatgggtttctgtctgtcttctcacctatagctctgtgaaaaataagtgttgctcactgctgagtactcttacaagtgtgactggctggggctggtgttgccggtggtaaaggaatttaccaagacagttgtagggggagaaaaataaaggcacatttattagagaaagtatgaaaattcattgcaagggtgcaatatgtagcactacagagaaggggctgtctgcaaagaggcaggggctggagggaagttttataaggtcttctggagggggctacatgctgatcgaggttgtgccatttgggctacctgtggagcaaggtcgttgtgtcagcgcgttgtttatggttacttgtctctcagaacaattgttctctcctaccttgggcccctccctggtggttatcaagactccacaaatatccagtgcctcttgcgctttaggatatatattaagaagtcactggctgtgcacggtggctcacgcccgtaatcccagtactttgggaggcagaggctggcggatcgcttgagttcagaagttggggaacagcgtgggcaacatggcggaaatcccgtctctac

SEQ ID NO: 18576 - protein, 120 aa, Homo sapiens [sequence omitted]

SEQ ID NO: 18577 - DNA, 1813 bp, Homo sapiens
aggaatagtcttccactaattcgctaggagtttgctctccccactcctatgggcttgtgagaggcatgcacagagtcctataatgcccactatgcatgcctgtagcaactttgaattctgttacatcatctggcacaatggccaagcaacttgggccagactctatatctgctatagagcccgtttttgtttcgggtttgacttgagacaagcagcccttgcaaactcctttagtgagtcagagaaatatccttaaatgtggtatatgttgaattcaaaaccccaataagcccccataaaactgtatttcccttttagtgataggaagtatatatatatagggcaacatgccatttactgtaaaaaggatgttttgacaaaaggaccagaagcattggacccctataaacttcatctatgttataggtctttgaatctgctgaagtttatgtctcttcttccagtattttacttctgttcaatgttataatattttactatacttaaggaacttgccacttcctgcttatgggtaccactttatgtaatattattaatatattgaattaacatgatgttttgcaaaatgtcaattaaactgaaagcagaagtgacagccctgacagaaaacagtgaagcagtgttcttgtttttaccacaccaaagcaaattgttttgattttcctccacaatgtgtgtagattaaaaagcattagctaaatcaaaagccgcatacaaagtgctggaaaccacattctgctcagtgaagataccacatcctagagcgaatgtgcaagtgtgacttaagtttatgctaatgtgcattcatcctataatccatctggttttgacagaggccagttaggttaactgaataaagatataaaatggacgaccgccccctggaacttttgagttttttgttgtggcagcgaccaattctgtttcctggagaatgcagttattatgttttattcattttattgccaggaaagtagaatttcagaagcctccccttggtcctgcttacaataatgtcccttggtatacaggtcaggaagaaatgtaagagtcctgacagctgttgaacctgtcaacttcaattacactttcaggaaggggtaactacgatgaactcattagaacccctttgggttggacatgggccaaagctctatgtaccatctgatcttcaaaaactcatactccagtcctattgaggcagctcatacctgtaatcctaataatttaggaggccgaagtgggaggatcactttaggctgagagtttcagatcagccttggcaacatagtaagaatctgtaaaaaaaaaaaaaaaaattagttgtttgtggtagtgtgtgcctgtagttacagctacccagaagactcaggcaggaggattgctttagcccaggaattcgagtttgcagtgagctatgatggtgtcattgcactccagcctgggcaatcaagcaagatcttgtctctaaaaagaaacaaacaaaaacaacaaacaaaagcccaaaaagggcctggtgcggtggctcatgcctgtaatcccagcactttgggtggctgagtggttggatcacttgaggtcaggagttcgagatcagcctggccaacatggtgaaaccccacctctactaaaaatacaaaaattagccaggtgtggtggtgttgcacctgtaatccaagccacttgggaggctgaggcatgagaatcacttgaacccgggaggcagaggttgcagtgagctgagatcatgccactgaactccagcctgggcgacagagcgagtctccacctc

SEQ ID NO: 18578 - DNA, 1770 bp, Homo sapiens
gttgattaatatttattaaacttccatatgccagttgccaaggatgtaaaaatatgacagggtgtctggcctcaaaggagcatagtctagtgggaagacttgacatgtaaacatataataatattaaaagcattgcatagtaattggggaacacaaaggaggagaaactgtttcaagaaaggatagaaataaatggtcaaggcagacatgaagtagtgttctgattagttttaagagaaatgtaggtgttttacatgttggtggatggggaaagtgcagaggtatgtgtgtgaaatgtgcatggtgtctctggagagctttaactagttccatgtgacctgaggtataggttaggctgtgagactgaaaaaggggagagaagggatactgtaaaggctttatatattatgctgagttatctaaggtgcgaaatgatcagacttacattctagccaaaatgagtcagatgagtgttgatgatgctttggtggaaaggccgcaacagaaactggtaagaatacacacatgcaagcgattcttaactacattgtaatcagtaaatgaagataacgacaatattctcattagggtacttactggctgaaacaaaactaactttgtcaggccggtgcagtggctcacacccgtaatcccagcactttggggaggctgaggcaggaggatggcttgagcccaggagtttgagaccagcctgggcaacatagtgaaaccccatcgctaccaaaaaaaaaaaaaaaaaaacaaaccctggctttgtatgtgtcttggtaaagtagcaactggcttttatgatccccctacccccacaccctgtgtctaaaagggcacatgactgctacagcctcaaaacaaaagtacttgatctcagtccaatgttgaaaagagctcattctgcctggcacggtggctcacgcctgtaatgccagcactttgggaggccgaggtgggtggatcatgaggtcaggagattgagaccatcctggctaacacggtgaaaccccatctctactaaaaaaatacaaaaaattagccaggcgtcgtggtgggcgcctgtattcccagctactcgggaggctgaggcaggagaatggcgtgaacccgcgaggcggagcttgcagtgagccgagatcgcaccgctgcactccagcctgggcgacagagcgagactccgtctcaaaaaaaaaaaaaaaagagaaaagagctcattcttacttttgctcaccaagaaaaacctgggagacgagaagaccttgcaggcaattccttaactgtttaccctcatcacacttccttgtcagagcccagcttacctagcaagggtgcctgggaatcccctgtacttcaatccccttcctgttctgtctctgtcctgacttcatccagttgatagtggacaaaccctattgtagattgctgcctgaaccccagtcagcaagtcctgttttggcttaaatctaaggtcttgttggatgtgatggctcacgcccgtaatcccaacacagagactaagacagatcacttgaggtcaggagttcgagaccagcctgggcaacatgaaaccccatctctactaaaaatacaaaaatacaaaaaaatccccagcacatggggcacatgcctatattcccagctacttgggatgctgaggcaggaggatagcttgaacccgggaggcagaggttgcagtcagccaagattgtgccactgaactccactccagcctgggcgacagagtgaggactccgtctc

SEQ ID NO: 18579 - DNA, 2698 bp, Homo sapiens
  CDS (1842)..(2159)
agacatttatttctcacagttctggaagaaagtttaaaatcaaggtcttggcaaatttggtttctggtgagggctgtctttctagcttgtagatgcctgtctgccttgtcttcacatgatctttcctaagggtgtgtgtgtgtgtgggtgtatctgtgtgtgtgtttgtgcgcacacacacgcgtgtgcacagggctggtagagagtgagctctctggtgtctcttattgtttctttttcttttttcttaccttgttattttctaatctagtcttcagagagatggtgtctcttcttataaaggcactcatcctaacagatcagtgctgtacccttgtgacctaatttaaccttaaatacttccttagaggccccatctccaaatgcaactacactgctgtttagggctataacatgaattttggggtatacaagaattcagttaataatacttgattaccctttatctgcccctgagagggtggttcatcttacccttttttagtcaaatcacatttggtaacatgaattgaggtgggtcagctatggtggcagactcactaagagtgtcatcctcaactatcctgtattgcttgtggcatacctagacattctatggccgaaagagcttgcatgtttaaatatttctatagttttagtccttggcacatggacttgagtccatttctctgtcaaatggcgatagttgttcctcagagttgttactggtcataatttaagggaaaatatattttgaaccataagatgcaaagattgttttttataaaaatgtacaatgttcctttttctattatttgtagagcttaaggacttgaatccagatcttctaattacaagtataagactctaagtagccagacatacccatttttttcaggataattggaattctccatagacaagcactctaggggaagttctggcaagttttatttgcaccatgtaatgcattgaaataaattgtaccatctaataaattgaaatgctgtgcgtttagccctcaagctctgttaagggacagactgcctcctcaagtgggtccccggcccccgtgcctcctgatggggtgacacctcccagcaggggttgacaggcatctcatacaggagagctccagctgacatctggcgggtgctcctctgagacgaaacttccagaggaaggaacaggcagcaatctttgctgttttgcagcctcctctggtgatacccaggcaaacagggtctggagtggacctccagcaaactccagcagacttgcagcagaggggcctgactgttagaaagaaaactaacaaacagagaaaggaatagaatcaacatcaacaaaacggacatccacacaaaaaccccatccgaaggtcaccaacatcaaagaccaaaggtagataaatccatgaagatgaggaaaaaaaccaatgcagaaaggctgaaaattccctaaaccagaatgcccattctcctccaaaggatcacagttcctcaccagcaagggaacataactggttggagaatgagtttgacgaattgacagaagtgggcttcagaaaatgggttataacaaacttctccgagctaaaggagcatgttctaatccaatgcagggaagctaagaaccttgaaaaaaggttgcaggaattgctaattaaaataaccagtttagaaaagaacataaatgagctgatggagctgaaaaacacagcacaagaacttcatgcagcctacacaagtgtcaatagctgaatcaagcagaagtaaggatatcagattgaatatcaacttaatgaagtaaagcatgaaggcaagaatagagaaaaaagaatgaaaaggaatgaacaaagcctccaggaaatatgggactatgtgaaaagaccaaacctgtgtttgattggtgtacctgaaagtgatggggagaatggaaccaagttggaaaacactcttcaggatgttatccagaaggacttccccaacctagcaagacaggacaacattcaaattcaggaaatacagagaacaccacaaagatactcctcgagaagagcaaccccaagacacataatcatcagattcaccaaggtggacatgacggaaaaaatgttaagggcagccagagagacaggtcagggaagcccatcagactaacagcggatctctcggcagaaaccctacaagccagaagagagtgggggccaatattcaacactcttaaagaaaagaattttcaacccagaatttcctatccaacctagctaaattccataagtgaaggagaaataaaatcctttacagacaaccagatactaagggattttgttaccaccagggctgccttacaagagctcctgaaggaaacactaaatatggaaaggaaaaactggtaccagccactgcaaaaacatacaaaattgtaaagaccatcgacactatgaagaaactgcatcaactaacaggcaaaataaccagctactgtcataataacaggatcaaattcacatgaaacaataattaaacttaaatgtaaatggactaaatgccccaattaaaagacacacactggtaaattggatagagtcaagacccattggtgtgctgtattcaggagacccatctcgtgtgcaaagacacacataggctcaaaacaaatggatggaggaatatttacaaagaaaatggaaagc

SEQ ID NO: 18580 - protein, 106 aa, Homo sapiens [sequence omitted]

SEQ ID NO: 18581 - DNA, 2887 bp, Homo sapiens
  CDS (39)..(464)
ttttgcgctcggaccttcgccagaggggccgggacatcatgacggtgggagccaggctccgaagcaaggcggagagcagcctcctgcgccgcgggccccgagggcgagggcgaaccgagggggacgaggaggcggccgccatcctggagcacctggagtacgcggacgaggcggaggcggcggccgagagcgggacgagcgcggcggacgagcggggcccggggacccggggcgcgcggagggtgcacttcgccctcctgcccgagcgctacgagccactggaggagccggcgccgagcgagcagcccaggaagaggtaccggaggaagctgaagaagtacggcaagaatgtcgggaaggtcatcatcaaaggatgccgctacgtggtcatcggcctgcaaggcttcgctgcagcctactccgccccgtttgcggtagccaccagcgtggtatccttcgtgcgctaatgggagctgctgtggcaggtgcccccagagtgaacgggagcccctgctgtgggaactttgtgaatcctggagcatctcagacttgaacacacagcatatttggaagagaaaacatgcctttctttgttgaatcacattagtatgatgagtgagtcatccctgcccatctgctgagcttctcacatctctcagtcacacgtggacccagtggtcaatcctgcagagaattcggcggaggttaggtttgggagtggagctagcgtgctaaagccagagccttcacgtgaaggtggcaggcactggggcggaagccaacactcaacagatgcaagcagtgtgggtgtgcagcagaacagtgatcttgggggaggaagaggatgttactagagtcagatgatttgctgtattctcctgaaaggtcgtaggctgacaggcgctcacattccttggctgcctcggttctgagggcagctaaggagctgtttattcctcaagtcatgctccccgatctccttcctctaccactctgtcaccaggagtttaattacaggcttgaggagaagaaaggaagaaaagatatcttgatgctttgaaaactgtgttggcagtgtggcatgactgtttaaagtagataaaaccttgtcattttaccccatccctgcatgactgtgaagctggcgaggaaggaggaagaagggcaagttcagatgcaggctgggtggctgggacaggttggctaagggactactctggagggctcttctgcctggcattgcccacttcggcccagccacgtgtttgcagcgaccagagtccctgcaaaggtgtggctggctgtggtcagggtgctactagcaccatcagcgcactcccgccattggctcagctcctctctgccagtccaactaagagtgctttgtcctgggtgggacataggggctgagagagatggggggagacataacacccaggaatgaaaatacagatttagagaaggaaccagtaagtaggagacagatgtgaaggaaatggaaatgaggcaagaggacattggaagagagaagtttgctgtccaggagccaggtctggagcatcagtgtgagggagttcaggtaggctgggcctgtgcctctaggtagggacaagggaggctgggtagccagggctggtgcttaaaacccctgaggccatgagctcattggctgcctttgtagcatcctgtcttcttctgtgctgcctggtttgatctcatctcacctggattcaaagggtaaggtgggcatgggtcttgggcctgacacccaccaaggatgacctgtggactgccatcggatgctgaacagggagatgaaaggaggtcctcttaccatacccctctgccaaccccccagtaggccactgttctgactttgtttccagaatatccagaaatccaaaggggctgttgctgaacagtctgcaggaccagtgacagcacctacctgttgtcccaaggcatacaaaggaggcctcaacgctcatgcttctctaatcaagccctaccaagacagacagaaagacagacagaaaaaaggaaggggtagaggagaaggttgaagctgtggagctagactctgcttcacttcctgaagcttcaacttcatgtcgaagattcactgggacccaattcctgcattgttaatatttgtgaggaaaagtgaaacaagtgatctggttttagcccagatgatgaaagtggatatggcacattttcacacacgtgagataattacagcttgccccacaacactgggtgttggagaaagggagagatagtcataagtggaagaaaaagccaagcatagtgagtgggaaggagagtgagagcctgtgcaggctgctgacgagccccaggcagcccacaagtttctcgtggggagatggaggcagagcccagggtaggggacagagctgctggggcctttccttgcctgggaatctgtcccaggaagagcttccccactcccatcccccaaattggaaaaaccgtacattcaagcctgtttggccctgaaattcttaagaatctggttaagaattaactcactaatgtcaaaagtcaaaacctcctaggggttgtcctgggagtcaggttcacgggtacagaagatgaatctcagatgtcactcaacctgagccgtcattctctgtggcagggctgccctgggtttctcttactcaatccctggagtgtaagcatttggattgtgtcacagattacctttttaccttttctttctttttttttctttttttcaatatcagtgcccacaccttactgagtattgagttttagagctttcgcttgatgtgcttgaccaagagacttcttttgtatccttttcttgtcctatgatgtaaataaaagcctcgatttatgt

SEQ ID NO: 18582 - protein, 142 aa, Homo sapiens
MTVGARLRSKAESSLLRRGPRGRGRTEGDEEAAAILEHLEYADEAEAAAESGTSAADERGPGTRGARRVHFALLPERYEPLEEPAPSEQPRKRYRRKLKKYGKNVGKVIIKGCRYVVIGLQGFAAAYSAPFAVATSVVSFVR

SEQ ID NO: 18583 - DNA, 2557 bp, Homo sapiens
atacaaaaaaattagccgggcatggtggtgggtgcctgtaatcccagctactcgggaggctgaggcatgagaatcacgtgaaaggcgggggttgcagtgagccaagatcgcaccactacactccaactgtgcaccacagcgagaccccatctcaaaaaaaaaaataataataataataaaatcatctctgccccaaagctatttcctcagatgcaaacattttccttgaccatagccaattaacctctcaacatctaatccacctccctttggaactggctgataccttgagaaacctttcttctccacagagggtctgccagttcagatgctgaaaagtttttctatctggagaaacccataagccatactattagacctatgccccaaagagctaagctaagttaaacacacagtgtttacaaatgagcagctgaaaaggcacacaagcttaagttgcagaagacacacacttgattttccttgctatggagggccctttagaacattccctacaaagttattttagaatgtgaagagacagctgggagcggtggcttgagtctctaatcccagtactttgggaggccaaggcgggcagattgcttgagcccaggagtttgagactagcctgggcaacatagtgaagccctggtctctacaaaaaatagaaaaaaaattagccgggtttggtggcatgcgcctagacccagctactgggaggctaaggtgggagggatggcttgagcctgggaggcaggggttgcattgagctatgatcgtgtcaccactgcactccagcctgggctacagagccagaccctgtctcaaaaaaaaaaagaatgtgaagagacagagaactgaatgcaaagaccctaactcaataaaactttgttttcttcacatgcaaaacaatcagaaatgctctttgttttgtaatctggccaccagccactaggcccatataggggtggaggagcctagacctgctaatctcggcgcatgtgagtggggttattgctgtcctctcaacaagaacccagttttgagagacaggacttgctggatttcctaggctgactaagaattcctaagcctagctggggaaggtgactacacctacctttaaatacagggcttataactcagctcacacccaaccaatcaggtagtaaagagggctcactgaaatacaaattaggctaaaagcaggaggtaaagaaatagtcaaatcatatatcgcccgagagcacagggggagggaaaatgatcgggatataaatccaggcattcgagccgggaggggcaacctcgtctgggtccctcccattgtatgggagctctgttttcactctattaaatcttgcaactgcacactcttctggtctgtgtttgttacggctcgagctgagctttcgctcaccgtccaccactgctgtttgccaccgttgcagacccatcgctgacttccacccctccagatatggcagggtgtccgctgcgtttctgatatagcaaggcgcccattgccgctcccaatcgggctaaaggctcgccattgttcctgcatggctaagtgcccgggttcgtcctaatccagctgaacactagttgctgggttccacggttctcttccatgacccacggcttctaatagagctataacactcaccatgtggcccaaggttccattccttggaatccgtgaggccaagaaccccaggtcagagaacaaaaggcttgctgccatcttgggagcggcccaccactatcttgggagctctgagaacaaagacctgtccgttaacagtttccctatactgatccagctcctggagtatctgctccctgacatgtctctatgtccagtccccttgtcaagatgcatgtagatgcattagacacaacagatgtcttttgattctccatcaaaatcaataaaacataaaacatttggataacataaaaattgcaggtgacctgaatgccagtattgaaaacaggtccatttaaagcccaagtcatggcagagtaggctaggaggattccttccttttggcttcactttcagggatggtcattttaattaaggtggggatcattttaaaatcacatataaacacaaacaatattattaaatagtgatttctgacataaattagggaaaaatgtggttcacatttcagtcaaacaatatttaataattagcttttccctgcttagcgccatttataagacaggcatttaagagtcaaaaaaacaaacaatgttgctttactcttaatagccaaaaactggaaacaaccccagcactttgggaggccgaggcggttggatcacctgaagtcaggagtttgagaccagcctggccaacatggtgaaacccatctctactaaaaatacaaaaattagccaggcatggtggcaggcacctgtaatcccatctactctggaggcaaaggcaggagaatcatgtgaaccagggaggcggaagttgcagtgagccgagatcatgccacagcactccagcctggatgacagagtgagactccatctc

SEQ ID NO: 18584 - DNA, 1713 bp, Homo sapiens
gtacagacggggtttctccgtgttggtcgggctgatctcaagctcctgacctcgggtgatccacccgcctccgcctccctgggtgctaggattgcaggcgtgagccaccgcgcctccggcccaatttagtaaccagaaaggaatagatcggcctggcgtggtagctcatgcttgtgatcccagcactgtggacggccgagcgcggcgatcgattgagcctaggacttccagaccggcctgggcaacgtggtgaaacactgtcttttttttttttttttttttttgagtggagtttcgctcgttttgcaggctggagtgcagtggcgtggtctcgactcaccgcggcctccacctcccgggtttaggtggttctcctgcctcagcctcctgagtgtctgggattgcaggcatgagccaccatgccagctaattttggttttatttttttggtacagacggggtttctccgtgttggtcaggctgatctcgagctcctgacctcgagtgatacgcccgcctccgcctccctgggtgctgggattgcaggcgtgagccaccgcgcccccggtccaatttagtaaccagaaaggaatagatctgcctggcgtggtgcctcccccttgtgatcccaggactttggaaggccgagtgtggcagatcgcttgagcctaggagttccagaccgcctgggcaacatggtgaaacccggtctctgttttgagacggagtttcacccttgttgtccaggctggagtgcaatggtgtgatctttgcccaccgcaacctcggcctcccggatttaggtgattctcctgcctgggcctccctagtagctgaggcaagaaaatcgcttgaacccaagaggcagaggtcgcagtgagccgagatcatgccattgcactccagcctgggactgtcccctgacaggcagtgcgacgaggtcaggcccgcgcccgccgagtcctagggccgctgccgccgacggccatggaggacgagcagctcgacagcctggagggctgggcgccggtccggcaaggcctcttcgccgatcccgagaggcaccggctgcgcttcctggtggcgtggaatggcgcggagggcaagttagctgtgacttgtcacgacctcaccgcgcagcagccgcagcggcgcgagggggcccggctggggctggagcccaaacccaaggccgctgtggtgcattggccgggaaacgaacccgggcctcccgcgtggcccccccccctggcatggctttggaatgtacagaatcctcagtgattattggttatctgattattattactataatagaagcctggcttgctgctgcccgtcattgacttactaaatacctgtgaaaggaaagtcagcaaaaaaaaaaaaaaaatcagattccacaaaatgagttggaatatattatgtagaattgaaaggttcactgaagtataagtttagcaataagcacaacaggggtagtccccacaaaattagaagcttcctgaggtgggagcatctagttgcttgctactgatgtccaatgctaagactgagctgagtattcgtggagtgggatgggttgaaatggcccagaatagttgcagcgattgcactgtaattaaaaatgtctaattggagctataggaaggcaagcagagactggcttcttcagcacactcatacaactgggctagctccaacattaaaact

SEQ ID NO: 18585 - DNA, 2088 bp, Homo sapiens
actagctgggcgcagtagtgcgcacctgtaatcccagctactcgagaggctgaagcaagagaatcgcttgatcccgggaggcagaggttgtgtgtggtgagctgagatcgcgccactgcactccagcctgggcaacagagcaagattccgtctcataaaacaaaaaaaaattatgagatttttaatgtgtggcccaattcctcttcttgcagtgtggcccagggaagagaaaagattggacaccccagcataaagccttcctcccattctgcagtggcgtgggatcagggaacagaaactcattttcatcctactgttgtggggaaccattcagtacttcctacagggcaggaggacgccaacatgcgaccaccttcctcccctcgccgacctccgactcccgcccagcccaggcgccccccaggctcctggaggttgctccgcgttgctgttgctgcaggtgaagggacacaggttgaggcccctccttgtaggacttctgagcctcacccccgagccctcgtaagatacctgtggagctgatctcaaagaaatctccacatctaattcagaaccatcatctcaccagaacacaacggccttgctcctgcctgggtgctgtaccatgatggcaccacaatggtccaagtgaccaccacctttgctggaacggctgcatgcacacagcactgggcacaaccacgtctgcaagtgcccatgactgttcaccatgtcagccctcagcacggcagcagggggcagcagcaccatgaatatcctccagccaactgaccctgccgcacccccagagggcacgatgcccattcccagcctccctgagcacaaccgctgtcctgatgctctgaaagggatgatatttggctttttactactggcctgggggccagaagcaggggctcacgcctagagtcccagcactctgggaggctgactgggcgaatatcttgagaccacgtgttcaggaccagcctcggcaacacaacaagatgctgtctctataaaaaacacaaaacctagttgagcatggtggcttacgtctgtaatcccagcactttgggaggccaaggagggtggatcacctgaacgcaggagttcaaaaccagcctggctaataacggcgaaactccatctcaactaaaaatacaaaaattagccagacgtggtggcgcgtgcctgtaattccagccactcgggagactgaagcaggacaatcgcttgcacccgggaggcggaggttgcagtgagccgagattctgccactgcactccagcctgggtgacagagtgagactcaacaacaacaacaaaagactgcctctggagtcaataccaggcttttggcctttcctcctccatctcctcagcaactgcctctggtgtgaataccaggcttttggcctttcctcctcaaatcgcctcagcaactgcctgtggaatgaatacgaagcttttggcctttcctcctccatctcctcagcgactgcctctggactgataaatcaggcttttggcctttcctcctccaactcctcagcgactgcctctgaagtgaatatcaggcttttgacccttcctccatctcctcagcgactgcctctggagtgaataccaggcttttggcctttccttctccatctcctcagcagtttttcttgcgaaggtccggtctgctggactctaggagacggccacatcacggaaagcactgtggtcctgtctgctaccatggcttcctgaagctatatgttcatttaagatgtctcaagaaaacgggcaaaatagggccgagtgccatggctcccgcctataatcccagctctttgggaggctgaggtgggcggatcacgtgaggctgggagttcaagaccagcctgaccaacatgaagaaaccccatctctactaaaaatacaaaaattagccaggcgtggtggcacatgcctgtattcccagctactcaggaggctgaggcagaagaatcccttgaacccaggaggcagaggttgcggtgagccgagatcacgccattgcactccagcctgggcaacaagagcgaaactctgtctcaag

SEQ ID NO: 18586 - DNA, 2569 bp, Homo sapiens
  CDS (403)..(1830)
gttgtagagataaatgaaaagttcacagagttacttttggcaattaccaattgtgaggagaggttcagcctgtttaaaaacagaaacagactaagtaaaggcctccaaatagacgtgggctgtcctgtgaaagtacagctgagatctggggaagaaaaatttcctggagttgtacgcttcagaggacccctgttagcagagaggacagtctccggaatattctttggagttgaattgctggaagaaggtcgtggtcaaggtttcactgacggggtgtaccaagggaaacagctttttcagtgtgatgaagattgtggcgtgtttgttgcattggacaagctagaactcatagaagatgatgacactgcattggaaagtgattacgcaggtcctggggacacaatgcaggtcgaacttcctcctttggaaataaactccagagtttctttgaaggttggagaaacaatagaatctggaacagttatattctgtgatgttttgccaggaaaagaaagcttaggatattttgttggtgtggacatggataaccctattggcaactgggatggaagatttgatggagtgcagctttgtagttttgcgtgtgttgaaagtacaattctattgcacatcaatgatatcatcccagagagtgtgacgcaggaaaggaggcctcccaaacttgcctttatgtcaagaggtgttggggacaaaggttcatccagtcataataaaccaaaggctacaggatctacctcagaccctggaaatagaaacagatctgaattattttataccttaaatgggtcttctgttgactcacaaccacaatccaaatcaaaaaatacatggtacattgatgaagttgcagaagaccctgcaaaatctcttacagagatatctacagactttgaccgttcttcaccaccactccagcctcctcctgtgaactcactgaccaccgagaacagattccactctttaccattcagtctcaccaagatgcccaataccaatggaagtattggccacagtccactttctctgtcagcccagtctgtaatggaagagctaaacactgcacccgtccaagagagtccacccttggccatgcctcctgggaactcacatggtctagaagtgggctcattggctgaagttaaggagaaccctcctttctatggggtaatccgttggatcggtcagccaccaggactgaatgaagtgctcgctggactggaactggaagatgagtgtgcaggctgtacggatggaaccttcagaggcactcggtatttcacctgtgccctgaagaaggcgctgtttgtgaaactgaagagctgcaggcctgactctaggtttgcatcattgcagccggtttccaatcagattgagcgctgtaactctttagcatttggaggctacttaagtgaagtagtagaagaaaatactccaccaaaaatggaaaaagaaggcttggagataatgattgggaagaagaaaggcatccagggtcattacaattcttgttacttagactcaaccttattctgcttatttgcttttagttctgttctggacactgtgttacttagacccaaagaaaagaacgatgtagaatattatagtgaaacccaagagctactgaggacagaaattgttaatcctctgagaatatatggatatgtgtgtgccacaaaaattatgaaactgaggaaaatacttgaaaaggtggaggctgcatcaggatttacctctgaagaaaaaggtgaccatcttaacttatatgcgttaaaaataactgaagagcatattcacatgtcaaagtattagctgaaatgtgtgtctgtgtagttggggggttttcttttaaattagaaatttctttttatgtgatatatggttagctcctctttttgtaaattcttcctctcttctaaaagtgattgatgatgtggaataatgaactcctttaagaagctggctggttctagtatattaaatgcttaaataaaaagtcctttcctttccacctagcaatgatattctcagttgtttctctcttgtggtgcagagttgcattgggttttctacattttcccactgagtcttccctgttgtaaaagggagttagaaagctgctaactaggattaagtttatagtcagggaacagtgttataatctcttcctagctaatgggcttactcaaagattcaccacctgactttgaatttgtcagcagcatactgtaaacagctgtaatgttcagaggcttgcaggaaaaaaacagagcatacttcagattgtactccatttaccttaacccctccaaaggaaataacagctatttcattatgtgcaatgtgttacaccctttcaaatgtaataaactcacaacaaaattgaaacataatacttgattataacttattaaatgtcttttatgtttttcctttgtcaggaaaacttgaaaactgtgcttttaattgaaataatattggatgaatgaaactgaattcagtattaaaatttgactgttagaaatgaaaaataaaatgatttaaaaat

SEQ ID NO: 18587 - protein, 476 aa, Homo sapiens
MQVELPPLEINSRVSLKVGETIESGTVIFCDVLPGKESLGYFVGVDMDNPIGNWDGRFDGVQLCSFACVESTILLHINDIIPESVTQERRPPKLAFMSRGVGDKGSSSHNKPKATGSTSDPGNRNRSELFYTLNGSSVDSQPQSKSKNTWYIDEVAEDPAKSLTEISTDFDRSSPPLQPPPVNSLTTENRFHSLPFSLTKMPNTNGSIGHSPLSLSAQSVMEELNTAPVQESPPLAMPPGNSHGLEVGSLAEVKENPPFYGVIRWIGQPPGLNEVLAGLELEDECAGCTDGTFRGTRYFTCALKKALFVKLKSCRPDSRFASLQPVSNQIERCNSLAFGGYLSEVVEENTPPKMEKEGLEIMIGKKKGIQGHYNSCYLDSTLFCLFAFSSVLDTVLLRPKEKNDVEYYSETQELLRTEIVNPLRIYGYVCATKIMKLRKILEKVEAASGFTSEEKGDHLNLYALKITEEHIHMSKY

SEQ ID NO: 18588 - DNA, 2406 bp, Homo sapiens
ttctcagtctcttttggtgaattctttttctctactatcttttaaataaataaatgttgatgtgcccaggcttctacactgtatcttctccccagatgatctcatcccacatttatttatttataaatagagatagggtcttgctgtattgcccaggtcttgagctcctgggctcaagcggacctcccacctcagcctcccaaaatgccagaattaacagatgtgagctaccgatcctagcccatccccacactcttgaatttcacaccacccaaatttgagccactaactcagagttctccccatggcttcactatatctagcttcctcctgtgctccatctgaacacatattattcattccctcatataagatatgctgctcttcttgttttccctatcatattagttggtgctactagccaccaagactctcaagccaaaagactgaaaattatcctagtttacactttccctcaccccactcttaatcagtcactttattcttcctctgtgtatctgaatctcatccacttctctccatcctcacagccatcgcccgtttgcccacctggtttcactagactggactctaccctcaaatctcaccatcctccaccctattctcccattccccctgtcagacacttcctcacgttgcataaaaggttagttatcataaatgattcactacaatctgttcccaagctttaccctccagcactgctaagacacttcattttggcatgcaccattttgtaagatactcaaaatccttttcgggacaataaaatatacatacccttgatacctgaagtgtgtttctgaggccctgaagcgtttgcattactgtattaaaaattcacagttgcagtcaggcccggtggctcatgcctgtaactccagcactttgggaggccaagccaggcagatcactggagatcaggagttcgagaccagcttggccaagatagtgaaacctgatgtctgctaaaaatacaaaaaattagcccggtgcggtggtgggttcctgtaattccagctactcaggaggctgaggcaggagaatcgcttgaacccaggaggcagaggttgcagtgagctgagatcatgccactgaactctagcctgggtgacagagcaagactccatcttaaaaaaaaaaaaaaaccagccaggtgtggtggcttatgcctgtaatcgtagcactttgggaggccgaggcaggctgatcacctgaggtcgggagttcaagaccagcctgaccaacatggagaaactctgtttctactaaaattacaaaattagctgggtgtggtggtacatgcctgtaatcccaactactcaggaggctgaggcaggagaatcgcttaaacccgggaatcggaggttgcggtgagccaagatcatgccatttgggcggcaagagcgaaactccatctcaaaaaaaaaaaaaaaaaaatccacaactggctgggcacggtggctcatgcctgtaattcttgtttcggaggatgcctgtttgggaggatcgcttgggcccacaagtttgagaccagcctgggcaacatagtgagaccccgcctttacaaaaaatttaaaaattagccaggtacagtggcatgcacctgtggtcccagctattgaggacactgaagtgggagggtcacctgagcccaggaggttgaggctgcagtgagccatgattgtaccactacactccagcttgggtgacagtgagaccctgtgtcaaaaaaaaaaaaaatccaaaatctcacccagaccaatactgtatcagaattatcattttaacaatatctccagatgatttatatgcacattaaagtttgagaagctggccaggtgtggtggctcacaccagcactttgggaggccgaggcagataggttacttgagctcaggaattcgagaccagcctgggcaacatggtgaaaccttgtctctataaaaaatccaaaaattagcccggtgtggtggtgggcacctgtggtcccagctactcaggaggctgaggtgggaggatggcctgaacccaggaggcagagtttgcattgagctgagattacaccactgcattccagcctaggcagcagagcaaaaccctatctcagaaaataaatagtttgagaagcaatctttttttaaatgagtgaagaaatcagacctaaggagaaatctgatgaagccagagctgagttaatattgataaatggatgcagtcaggtggtctatacttaatttttggtgaggggaagggacagtggaggcagtattgattttgaggaagccaaacaggacagcctgatgaattcaagatttccagcatatatacatcttcaccaatcccaccaccttgctccagcctgtcatatcactgtgtctacat

SEQ ID NO: 18589 - DNA, 2904 bp, Homo sapiens
  CDS (2263)..(2583)
tttaagtgcaaagttcagtagttaagtacattaatattgttgtatagccatcaccgtcatctatctccagaactctttctatcttgcaaaactgaaattctgtacccgtaaacagtaactccatttctcttctgcagcattggcaatcaccattctccttcctctctctgtttttgactgttctgcctcataaaagtacctcatgtgaatggaatcatacagtatttgtctttttgtgcctgatttatttcactcagcataatgtcctcatggttcatccgtgttaatagcatgtgtcagaatttctatcctttttaaggctaaatgacccattgtatgtacgtatcactgtttatctattcatccattgatgaacacttgatcacatatttttatttaaaacatttttaaagccaggcacaatggctcatgcctgtaatcccagcactttggaaggttgaggtgggcagatctcttgaggtcaggagttcgagaccagcctggccaacatggcaaatcccatttctactaaaaatacaaaaattagccgggcgtggtggcaggcgcctataatcccagcttcttgggaggctgtggcaggaaaatcacttgaaccccggaggcggaggttgcagtgagccaagactgtggccactggactccagtctgggcaacagagcaagactctgtctcaaaaaaaaaaaaaaaaaaaaaaaaaaaagataaaagatgtttaaaacctcttttcccggctgggcgtggtggctctcgcctataatcccagtactttgggaggctgaggcaggcggatcacctgagatcgggagtttgagaccagcctggccaacatggtgaaactccatccctactaaaaatagaaaaattagctggtcatggtggtgtgcgcatgtaatcccagctactcaggaggctgaggcaggagaaatcacttgaacccagggggcggaggttgcagtgagccaagattgcgacactgcactccagcctgggcgacagagcgagactgtctgcaaaaaaataaacaacttcttttccttcaggagagtcaagatggttaggacacttttcagtcagagggttgctgtgtcacgactgttgctctttcttatttcattgcatttattacagctctttggtttttgttgttgtttttacgtttttcagagacaggtctcattctgttgccaaggctagagcacagaggcacgatcacggctcacggcagccttgacctcctcctgggctgaagcagtccaacctgcctcagcctctgagtagctgggactaaaggcatgtgccactgggcccggcatattctgttttgatctcagtatcagttaggatgctttcactgacaggactctggctctgtttctgtctcccatgtcatgacatcctggtcaggcaggactggggctctgctgtgcttctctgagactctcttgtacccagctggcctccatggaggtggcgtcatcctcagctcagtttgactaattctaagatacacttttttccttcacatttgctcctatagttgggcttcattgtacattctgtggtgtggttataatttattggctatattttatcctttctcagtgcacataaaataacagtggatcttacaatgaatgaaatttagcaagtgttgagaggaagaaagaattggacttcttttccccttaggagcaaggaaaatttccccagcaggtccccagtagacccacatattgttgccatggattgggtcatgtgtctatttctaaaccatgaggaaagagtttaacatgattagcacttgagttggaatggatgctggggaatccacagctaaggccatcatgtctaaagacatgggatacaggcagcagtgagccttggaagtgcatagagatttcagtcgtctgtctagttattatttctgtctagattttgagcatttctaaattgtgtgtcatttacatttttaaataacctattttaactctgtaatgaaagaacttaagaagtgaaggagttatgaagtgaagtgaacacaaaaactatcagggtcacatagtttatagaagatacttctcatcccagacctggggttataactgatacagactgaaagaagctgcaggaggacagtgtctgcttgttcaagtagagtcttttgttggtgtgttccattaggtgggcctgactgccgcctcggggctgtattttcggtctgggaacctgatactcaacctaatgccactcagtttcgtctcccattctctactttctcttgcactgtattttactacccactttttccctctcactgtgtatttccagtgtcttgagatctttgtaccagacttttattttatagattttttttttcctaccataaaagaaaatgtagttcctaaggaaaagatgcttacattcttggaaaaggagcaaatttactgtgattggatttttgtataccaccatttaaaatcagatgtttggttttttacatcagattttaaatgtattctgtgtgcttcattttcaaaaagaaatgttttggagcaccaaaaataataaaacttttaaaaatgaattggcaacatttacctttttaaaatttttgacttttggctcacgcctgtaatcccagcactttgggaggccaaggtgggtagatcatttcagctcaggaattcgagaccagcctgggcaacatggcaaaaccccatctctacaaaaaatacaaaaattaggtaggcatggtgatgcatgtctgtagtcccagccactcaggaggctgaagtgggaggattgcttgagcctaggcggttgaagcagcactgagccacgatcacaccattgcactccagcctggtgacagaaccagtcttt

SEQ ID NO: 18590 - protein, 107 aa, Homo sapiens
MPLSFVSHSLLSLALYFTTHFFPLTVYFQCLEIFVPDFYFIDFFFPTIKENVVPKEKMLTFLEKEQIYCDWIFVYHHLKSDVWFFTSDFKCILCASFSKRNVLEHQK

SEQ ID NO: 18591 - DNA, 2161 bp, Homo sapiens
  CDS (31)..(1425)
actttcccctctccgtctcctgcgggcgcaatggaggaggaggatgaggaagcgcgggcgctcctggcaggcggccctgacgaggccgacagaggtgccccggccgcccctggagccctgccggccctctgcgaccccagtcgcctggcgcaccggcttttggtgctgttactgatgtgcttccttggctttggcagctatttttgctatgataatcctgctgcccttcagactcaagttaaacgagatatgcaagtgaataccacgaaattcatgctgctgtatgcctggtattcttggcccaatgtagttttgtgtttctttggtggctttttgatagaccgagtatttggaatacgatggggcacaatcatttttagctgctttgtttgcattggacaggttgtttttgccctgggtggaatatttaatgctttttggctgatggaatttggaagatttgtatttgggattggtggcgagtccttagcagttgcccagaatacatatgctgtgagctggtttaaaggcaaagaattaaacctggtgtttggacttcaacttagcatggctagaattggaagtacagtaaacatgaacctcatgggatggctgtattctaagattgaagctttgttaggttctgctggtcacacaaccctcgggatcacacttatgattgggggtgtaacgtgtattctttcactaatctgtgccttggctcttgcctacttggatcagagagcagagagaatccttcataaagaacaaggaaaaacaggtgaagttattaaattaactgatgtaaaggacttctccttacccctgtggcttatatttatcatctgtgtctgctattatgttgctgtgttcccttttattggacttgggaaagttttctttacagagaaatttggattttcttcccaggcagcaagtgcaattaacagtgttgtatatgtcatatcagctcccatgtccccggtgtttgggctcctggtggataaaacagggaagaacatcatctgggttctttgcgcagtagcagccactcttgtgtcccacatgatgctggcctttacgatgtggaacccttggattgctatgtgtcttctgggactctcctactcattgcttgcctgtgcattgtggccaatggtggcatttgtagttcctgaacatcagctgggaactgcatatggcttcatgcagtccattcagaatcttgggttggccatcatttccatcattgctggtatgatactggattctcgggggtatttgtttttggaagtgttcttcattgcctgtgtttctttgtcacttttatctgtggtcttactctatttggtgaatcgtgcccagggtgggaacctaaattattctgcaagacaaagggaagaaataaaattttcccatactgaatgagaagttaaaatgaatgtgtcatgagaatgggcttaacacatcgttggtttgaaaacttccatttttaaaaatttagagtttagtcattagaaaaaataatggactggaaagttatatttatatccaaatatacctatttcaaagtgtatttgtgaggcctgttttagcctgtgtcttttgtattgtgtgttgctaaagaattctacttttagtaggctaatcaacaatgaaagggttagaaaattgctgtggaacatccaggtgaacttcaggaaagacagtgaaaaatggaaaacgttggagcttctgttgagataatcttcattaggtatatatcttagggatacagccttttctttatcttatagcaggaaaaaaaaacttttgagggaaatagaagggctgcgttacacaaaataaacaatggcattgtcataggccttccttttactagtagggcataatgctagggaatatgtgaagatgtttttatgaagtctctttctgatcacgaacaatagcttgcgctctactctgtagttatgtggattgccgagcaatgacccttttcaatttcttatttctgtgttactgaggaccctaatcacttagggatgtaattttatagtataaactttctgtacagtttttcttatagtctaataagtaaaaagtgtccttcaaattatgataattgcctatgtacatggataaattaaaacactgcacacgg

SEQ ID NO: 18592 - protein, 465 aa, Homo sapiens
MEEEDEEARALLAGGPDEADRGAPAAPGALPALCDPSRLAHRLLVLLLMCFLGFGSYFCYDNPAALQTQVKRDMQVNTTKFMLLYAWYSWPNVVLCFFGGFLIDRVFGIRWGTIIFSCFVCIGQVVFALGGIFNAFWLMEFGRFVFGIGGESLAVAQNTYAVSWFKGKELNLVFGLQLSMARIGSTVNMNLMGWLYSKIEALLGSAGHTTLGITLMIGGVTCILSLICALALAYLDQRAERILHKEQGKTGEVIKLTDVKDFSLPLWLIFIICVCYYVAVFPFIGLGKVFFTEKFGFSSQAASAINSVVYVISAPMSPVFGLLVDKTGKNIIWVLCAVAATLVSHMMLAFTMWNPWIAMCLLGLSYSLLACALWPMVAFVVPEHQLGTAYGFMQSIQNLGLAIISIIAGMILDSRGYLFLEVFFIACVSLSLLSVVLLYLVNRAQGGNLNYSARQREEIKFSHTE

SEQ ID NO: 18593 - DNA, 3368 bp, Homo sapiens
  CDS (129)..(1640)
aagatggcggcgcgctgggagcgtatcatctgcgtttctaggagcttcgctatgcggctgctttaagattctagggttgtacaggcccacgccagacacgacgtctggcaggaacctcggcctcagagatggctctgagtaaatcaatgcatgcaagaaatagatacaaggacaaacctcctgactttgcatatctggcatccaaatatccagattttaagcagcatgttcagataaatctggatggaagagtgagccttaattttaaagaccccgaagcagtcagagctctgacgtgtactctcctaagggaagattttggactttctattgatattccattggagagactaattcccacagttcccttgagactcaactatattcactgggtagaagatctgatcggtcaccaggattctgacaaaagtactctccgaagaggaattgacataggcacgggggcatcttgcatctaccccttacttggagcaaccttgaatggctggtatttcctcgcaacagaagtggatgatatgtgtttcaactatgcaaagaaaaatgtggaacagaataacttatctgatctcataaaagtggtgaaggtgccacagaagacactcctgatggatgctcttaaagaagaatctgagataatctatgacttttgcatgtgcaaccctcccttttttgccaatcaattggaagccaagggagtaaactcacgaaatcctcgaagacctccgcctagttctgttaatacaggaggcatcacagagatcatggcagaaggaggtgaattagagtttgttaaaaggatcatccatgacagtctacaacttaaaaaaagattaagatggtatagctgcatgctgggaaagaaatgcagcctggcgcccctgaaggaggagcttcgcatacaaggggttcccaaagtaacgtacactgaattctgtcaaggtcggacaatgagatgggccttagcttggagtttttatgatgatgtcacagtaccatcaccaccaagtaagcgaagaaaattagagaaaccgagaaaacccataacattcgtggtgctggcgtccgtgatgaaggaattatccctcaaagcatcacctctgcgctcggagacggcggaaggcatagtcgttgtcacgacatggattgaaaaaattctcactgatttgaaggtccagcataaacgagttccctgtggaaaagaggaagtcagccttttcctaacggccatagaaaactcctggattcatttaaggagaaagaaaagagagcgtgtgagacagctgagagaagttccccgagctcctgaggacgtcattcaggccttggaagagaaaaagcccacccccaaagagtctggcaataggcaagaactggccaggggcccccaggagaggaccccctgtgggcctgctctgcgggaaggcgaggctgccgctgtggagggcccgtgcccgagccaggagtccctgtcccaggaggaaaacccggaacccacggaggatgaaaggagtgaggaaaagggaggggtggaggttttggaaagttgtcaaggctctagcaacggagcccaggaccaagaggcttctgagcagttcggcagcccagtggctgaaagggggtaacgtctcccaggagtggccggacagtacctgtttaagtgtttgataaacgttaagaaggaggtggacgatgccttagtggagatgcactgggttgagggccagaacagggatctgatgaaccagctttgcacctacatacgtaaccaaattttcaggcttgttgcagttaactagaaacctcctgcacagttggaaacgtgttgatagtaacttgctttggagtggcctgtggggtggcaagaggaatcctaccagcggcccattagtagcacgatgtggaattatcttcgaaaacaaaaacctatgaatctgtcccccacctccccccgcctccttcccgctttttgagttacagggagtcgtagtgtggtcatttacaaggaggaattgtggtcatcagtaacaacagaaagccctcagtaaactcccgagggattgcaagctggctcaagctggcccctcagctctggactgcctctgcaaggtcagaagggttgtttgtggagtctgggctgggcagcactgcctagaatatcatgctgtctctgtcacccaagggtgtttcttgaggaggggtggctctctctgcctccagctggaggccctggtaccctgttctaggtcactcttcaagatggggcctaccttgcatcaatcccacaaagggagctgtatggtgggtggtggggaatctgggagagaaaccttagtaatgctgggaaggagcagcagagtctggggaccacccggtaaatggcacattcctgacacctggctgttttgatgttgcttatttcagaagcagaattaggtaagcaaaactccccggtgtgactgaggcacacagaaggcacccatacccccacctccagcctgttgacagtaccattttgtagcagttttactactgtgtgatttttgtttggacatctgaagtagagcttgttttgtttttaaataagaatattcacaaattaaaaaccagcggtcctatttgaatcctggggttagctgagtgagcggctgatgatagaaatgagaaatagaacaaaatagtatgtgccgtaggtagcttaagaaggtctcagatattttgttgctgatcaaatactgtttttttgtggcttcacttgtaatcccccctgtacttacctactcacattggagagttctgaggccggagtaactgtgtccttgaaacacgtttctaattggaatgccagggttcagtagccgtccccccggaaaggggtgaccttttgctgtgcttgatgttgcatcagcagcctagggttctgtttagactaaaatcttggccagagctccttgccatctgctaagaagactggggctgagtagttaagccagccttctgagaggtggctgttggtcaggacgggaagctggtgaccttggcatgtcttggcagcagctagatcaggccctcggcagagacacaggaagcggaactgctgtgccttaacttggctgcggagctggagctggagaaggcagcatactgaccagtggctttttgattgattgtttgttatgaggtggagttttactcttgttgtctaggctggagtgccgtggtgcgatcttagctcactgcaacccccgcctcccgggttcaggagactcgcttgaacctgggaggtggaggttgcagtgagccgagaatgccactgcactacagcctgggcgacaaagtgggactgtctc

SEQ ID NO: 18594 - protein, 504 aa, Homo sapiens
MALSKSMHARNRYKDKPPDFAYLASKYPDFKQHVQINLDGRVSLNFKDPEAVRALTCTLLREDFGLSIDIPLERLIPTVPLRLNYIHWVEDLIGHQDSDKSTLRRGIDIGTGASCIYPLLGATLNGWYFLATEVDDMCFNYAKKNVEQNNLSDLIKVVKVPQKTLLMDALKEESEIIYDFCMCNPPFFANQLEAKGVNSRNPRRPPPSSVNTGGITEIMAEGGELEFVKRIIHDSLQLKKRLRWYSCMLGKKCSLAPLKEELRIQGVPKVTYTEFCQGRTMRWALAWSFYDDVTVPSPPSKRRKLEKPRKPITFVVLASVMKELSLKASPLRSETAEGIVVVTTWIEKILTDLKVQHKRVPCGKEEVSLFLTAIENSWIHLRRKKRERVRQLREVPRAPEDVIQALEEKKPTPKESGNRQELARGPQERTPCGPALREGEAAAVEGPCPSQESLSQEENPEPTEDERSEEKGGVEVLESCQGSSNGAQDQEASEQFGSPVAERG

SEQ ID NO: 18595 - DNA, 2553 bp, Homo sapiens
  CDS (111)..(836)
ataactcgttgcgggctccgcgcggtcccacttcccggctcccttcgcctccaggatgcgctgagccctacaacacccccagcggccgccggctcccccacgaggtgtgaatgacagaggtggtgccatccagcgcgctcagcgaggtcagcctgcgcctcctctgccacgatgacatagacactgtgaagcacctgtgtggcgactggttccccatcgagtacccagactcatggtatcgtgatatcacatccaacaagaagttcttttcccttgctgcaacctacagaggtgccattgtgggaatgatagtagctgaaattaagaacaggaccaaaatacataaagaggatggagatattctagcatccaacttctctgttgacacacaagtcgcgtacatcctaagtctgggcgtcgtgaaagagttcaggaagcacggcataggttccctcttacttgaaagtttaaaggatcacatatcaaccaccgcccaggaccactgcaaagccatttacctgcatgtcctcaccaccaacaacacagcaataaacttctatgaaaacagagacttcaagcagcaccactatctcccctattactactccattcgaggggtcctcaaagatggcttcacctatgtcctctacatcaacggcgggcaccctccctggacgattttggactacatccagcacctgggctctgcactagccagcctgagcccctgctccattccgcacagagtctaccgccaggcccacagcctgctctgcagcttcctgccatggtcgggcatctcttccaagagtggcatcgagtacagccggaccatgtgatgtcggctgggcagccgccaccaggccccacccttcagccgcccgcagagcccgccttcctgtccatctgaccccttctgttttctgcaaggagctgccagccatctaactgggctcgtcggcctgccccagctgcaggcccggtgctacacgggctcgggaacagaacaccgtgggcatgcgcagagcatgcccatccgtggcaggtacgccacagcagacacaaaggctcttcagctcccctccctgcttctggaaacctctgcctgctgccctggccctgcccccctgcgcatgcaccatccccagggctgacccagtgtggctgcattcactgggaggggcctgccctcactgggcctctcccactccgctgcctgttcttgcagctccttcctggaaagctggaggggactttctcctgcaagggaggaacgcaagtattatggacacacttgaccgtaaaggcacaggagcctcgggacaagggggcgcaataaagggaatggcccgtccccttccagaaccagcccaaagaagcctggggggtgaggagtggcccccactcctccatgaggggctgatgaggggtgggcagcctgggggaggctttcctcgcaagcacagagctctgaggctcagccccctggcacaggcggtcacgcatcaggacggttcctactcctcagcaccttccgtgcagttaccagtgccctgggaggtcacactgcccgtcggaccttggcatgctccattcagctgacctgctgaggacaggcatcgccgagactccttgggtcctccccgccctccctcatgctgccacaagctgctgctccaaggcctggccacatgcagacaggaggaagctgagctcgacattaggcctcaaggctgccatctgtcttgtagggcctggccttgtgggcagggggcagtcctgtgccttgtgggccctcagcctctgagggcagagatgctgtcagtgccgcaggtgcatcacatacttctagcatcctctccaccctgcattccaaatgctgcttgctgcctgccctgccctccgatgcaggggtggggtggggggcggagtcccgcccagcatagctgcagtgtcacaaagccatggcagagggtcctagcggcgccaccctgccccagcctgaggaggagggagagggaggaacaaccctgggcagacggggtctcagggacctgtgtccttccgcctccagagctgcccagccacgggctctcagggtgctggggcagccccaggtcccctcttgaactcagctggggccaggggccctcagaatgaaggcaggcaccaggcaggagcagcatccccctccttgacggtgctggcaggagggccgcgccatgctgactgcttgaacctctgctgacctgacagtgctggcgggagggccgcaccatgctgactgcctgaatctctgctgaggctgcctgcctgccgggcccagctcagcgccctctccactgcgaatcagtggcgatcatgtgatttctatttctgccccacagggtaagggacgagtcttctggaaggctctgccatggacatttgtcctcgggctcagaggccccaccctgccccacacctgcccctaatcactgcagtgtccagcccagtgttgaacagattgtagcgttctgtctcattacgagcaaataaatagactttcattgg

SEQ ID NO: 18596 - protein, 242 aa, Homo sapiens
MTEVVPSSALSEVSLRLLCHDDIDTVKHLCGDWFPIEYPDSWYRDITSNKKFFSLAATYRGAIVGMIVAEIKNRTKIHKEDGDILASNFSVDTQVAYILSLGVVKEFRKHGIGSLLLESLKDHISTTAQDHCKAIYLHVLTTNNTAINFYENRDFKQHHYLPYYYSIRGVLKDGFTYVLYINGGHPPWTILDYIQHLGSALASLSPCSIPHRVYRQAHSLLCSFLPWSGISSKSGIEYSRTM

SEQ ID NO: 18597 - DNA, 2226 bp, Homo sapiens
  CDS (30)..(302)
aatgaaggcaggccacttccggcgtagccatggcggctaacgctactaccaacccgtcgcagctgctgccgttagagcttgtggacaaatgtataggatcaagaattcacatcgtgatgaagagtgataaggaaattgttggtactcttctaggatttgatgactttgtcaatatggtactggaagatgtcactgagtttgaaatcacaccagaaggaagaaggattactaaattagatcagattttgctaaatggaaataatataacaatgctggttcctggaggagaaggacctgaagtgtgaatgagtttccttgacttacactagattttgttttggcttataatgacaagaaaatggaattttttttcccactttctaatgtttaaatcccataaagctaagtttcccgttaaagggaagtgctttgaagatgtgtacccatttttgtaagttaatcatgattatcctggaaaaagaagaaaagagcttcttctttgcagatgaaaataaaggtgtttttggttaactgtcattttgtttattctactgcagtagccagtggaacaaagtttgtagttattttgccacttacttttctgtcattatatgcttatttgttttgtcatttacgtgaccatttgattctcaaacaaaagttgttccaaacaaaatgatgaactttgatttgaacaggtgcatttaaacaaccggaaatgatcacttagaaaattcaattaaaatgctgttgttttgtaatgaggatttttcttctgatttcaaattccatgaactcctattgaaaacaaacaatgtacaggtaatatatgcacattgtagaaatgcaggaattatctattggaattaccctaaagatagaaattttatctatttgcttataaaattgattcagaaggttattaccttaatgtagttattactgaattgccaggaaatgagtggagacagagctttaagataaaggatactaaaaacagctaagaactccaggactcaggtcaaatcaaggaactgataataagatcattgaactgtataaattaagtcaaagaactcctattaaaaacaaacaggtaatatatgcacattgtagaattgtaggtaagcaaaaaggagaaggttgatcatgctttgctgtatgtcttcgtagactttctcagtccactctcagtacacgttttattttacttgctcatcctgattatactgtttttaccctccacttaagtcattttttgaatttaaatggtgaatatctttctgtgtcaaatatttcaacattaatatgtacatagtattaaatggatttactataaattatttagcctattcttactggccacagtagtctaactagatctttatacatttatatttttctagaataaactcaaaaatgtgtaagatcaaagggtatatattgtgttgccaagaaaaagtttgtgccaatgtatatttttgccaggagtctttcatagtaccatttatatccttcccagcattagctgtgttctaccttctctcctctttgccatttttacaagaaaaccgggcatgtctaaagttttcttttcctttttttttttttttttgttttttggagagtctcactggaatgcagtggcatgatcttggctccctgcaacctccagtcaggctggtgtgccttgtcgcgatatcaacgcgacctccgcctcccaggttcaagtgattgtcctgcctcaccctcctgagtagctgggattacaggtgggcgccaccactcccatctaatttttatatttttagagagatggggttttaccttgttggccaggctggtcttgaactcctgacctctagtgatccacctgcctcagcctcccaaagtgccggtattaaaggcatgagccaccaggcctggcctaaaattttcttgattaattttgatctcatttgtattttgtaaatgacttatctgttgaggcttttgccattgagatgtttgtctttttcttactaatttgtaagaattcttgatgggtttctgttagtcatgtattttgctaataatttccctagtttgtagtttgccacttagtgctatttttgacataaatgatgtattttaatgtagttgcatgttgacctagtccattatggtttttgtatttggtccacgtggattggaaaacctttgctttgattatacttttctttgggc

SEQ ID NO: 18598 - protein, 91 aa, Homo sapiens
MAANATTNPSQLLPLELVDKCIGSRIHIVMKSDKEIVGTLLGFDDFVNMVLEDVTEFEITPEGRRITKLDQILLNGNNITMLVPGGEGPEV

SEQ ID NO: 18599 - DNA, 823 bp, Homo sapiens
  CDS (107)..(685)
gaaaaatcatgacaataacttgtctcagtctggatcagactcaagttgctctccagaatgcctctgggaggaaggcaaagaagttatcccaactttctttagtaccatgaacacaagctttagtgacattgaacttctggaagacagtggcattcccacagaagcattcttggcatcatgttgtgctgtggttccagtattagacaaacttggccctacagtgtttgctcctgttaagatggatcttgttgaaaatattaagaaagtaaatcagaagtatataaccaacaaagaagagtttaccactctccagaagatagtgctgcacgaagtggaggcggatgtagcccaggttaggaactcagcgactgaagccctcttgtggctgaagagaggtctcaaatttttgaagggatttttgacagaagtgaaaaatggggaaaaggatatccagacagccctgaataacgcatatggtaaaacattgcggcaacaccatggctgggtaattcgaggggtttttgcgttagctttaagggcaactccatcctatgaagattttgtggccgcgttaaccgtaaaggaaggtgaccaccggaaagaagctttcagtattgggatgcagagggacctcagcctttacctccctgccatgaagaagcagatggccatactggacgctttataagaggtccatgggctgggatctgatgaggttgtatgatggctgctgggcagcacctcctaacttcagggaataaagtgctaaagtgtaaaaaaaaataaaaataaaaataaataaataaataaaattaaaaaaaat

SEQ ID NO: 18600 - protein, 193 aa, Homo sapiens
MNTSFSDIELLEDSGIPTEAFLASCCAVVPVLDKLGPTVFAPVKMDLVENIKKVNQKYITNKEEFTTLQKIVLHEVEADVAQVRNSATEALLWLKRGLKFLKGFLTEVKNGEKDIQTALNNAYGKTLRQHHGWVIRGVFALALRATPSYEDFVAALTVKEGDHRKEAFSIGMQRDLSLYLPAMKKQMAILDAL

SEQ ID NO: 18601 - DNA, 3308 bp, Homo sapiens
  CDS (56)..(2314)
catcagctttgaaagccaacacatcctcctgagaggggacaagacaagcagggatatgtgggccactggatctttgccagacttcccggctgcagccaagttcttagggttccgtcagcgctgcatccccaggagcctctgcctcagtgagtgtcctctggagcccccaagcctcacccgcctctgtgccactctgaaggactgcccgggacccctggaactgcaattgtcctgtgagttcctgagtgaccagagcctggagactctactggactgcttacctcaactccctcagctgagcctgctgcagctgagccagacgggactgtccccgaaaagccccttcctgctggccaacaccttaagcctgtgtccacgggttaaaaaggtggatctcaggtccctgcaccatgcaactttgcacttcagatccaacgaggaggaggaaggcgtgtgctgtggtctctcagcaaacctgctgggcgacagcggactcagatgccttctggaatgtctgccgcaggtgcccatctccggtttgcttgatctgagtcacaacagcatttctcaggaaagtgccctgtacctgctggagacactgccctcctgcccacgtgtccgggaggcctcagtgaacctgggctctgagcagagcttccggattcacttctccagagaggaccaggctgggaagacactcaggctaagtgagtgcagcttccggccagagcacgtgtccaggctggccaccggcttgagcaagtccctgcagctgacggagctcacgctgacccagtgctgcctgggccagaagcagctggccatcctcctgagcttggtggggcgacccgcagggctgttcagtctcagggtgcaggagccgtgggcggacagagccagggttctctccctgttagaagtctgcgcccaggcctcaggcagtgtcgctgaaatcagcatctccgagacccagcagcagctctgtgtccagctggaatttcctcgccaggaagagaatccagaagctgtggcactcaggttggctcactgtgaccttggagcccaccacagccttcttgtcgggcagctgatggagacatgtgccaggctgcagcagctcagcttgtctcaggttaacctctgtgaggacgatgatgccagttccctgctgctgcagagcctcctgctgtccctctctgagctgaagacatttcggctgacctccagctgtgtgagcaccgagggcctcgcccacctggcatctggtctgggccactgccaccacttggaggagctggacttgtctaacaatcaatttgatgaggagggcaccaaggcgctgatgagggcccttgaggggaaatggatgctaaagaggctggacctcagtcaccttctgctgaacagctccaccttggccttgcttactcacagactaagccagatgacctgcctgcagagcctcagactgaacaggaacagtatcggtgatgtcggttgctgccacctttctgaggctctcagggctgccaccagcctagaggagctggacttgagccacaaccagattggagacgctggtgtccagcacttagctaccatcctgcctgggctgccagagctcaggaagatagacctctcagggaatagcatcagctcagccgggggagtgcagttggcagagtctctcgttctttgcaggcgcctggaggagttgatgcttggctgcaatgccctgggggatcccacagccctggggctggctcaggagctgccccagcacctgagggtcctacacctaccattcagccatctgggcccaggtggggccctgagcctggcccaggccctggatggattcccccatttggaagagatcagcttggcggaaaacaacctggctggaggggtcctgcgtttctgtatggagctcccgctgctcagacagatagacctggtttcctgtaagattgacaaccagactgccaagctcctcacctccagcttcacgagctgccctgccctggaagtaatcttgctgtcctggaatctcctcggggatgaggcagctgccgagctggcccaggtgctgccgcagatgggccggctgaagagagtggacccggagaagaatcagatcacagctttgggggcctggctcctggctgaaggactggcccaggggtctagcatccaagtcatccgcctctggaataaccccattccctgcgacatggcccagcacctgaagagccaggagcccaggctggactttgccttctttgacaaccagccccaggccccttggggtacttgatggccccctcaagacctttggaatccagccaagtgatgcacccaaatgatccacctttcgcccactgggataaatgactcaggaaagaagagcctcggcagggcgctctgcactccacccaggaggaaggatacgtgtgtcctgctgcagtcctcagggagaacttttttgggaaccaggagctgggtctggacaaaggagtaccctgcattacgtgggatatgtgtgatcaattggggacatgcgacacacaatgagggtgtcatgacaatgcatgacacgtacggttatatgtggcagtgtgaccccttgacatgtggcgttacatgaaagtcagtgtggcacgtgttctgtggcatgggtgctggcatcccaagtggcaggatacatgattgttggtctatatatgacacatgacaaatgtccatgtcacaggactcatggctggccagatgacctcaggctggcccaagatctaatttattaatttttaaagcaaatacatatttatagattgtgtgtatggagcagctaagtcaggaaaagtcttccgcccgagctgggaggggagagtgtccatgcactgaccagtccaggggctcaagggccagggctctggaacaagccagggactcagccattaagtcccctcctgcctcaatcctcagcctacccatctataaacttgatgactcctcccttacttacatactagcttccaaggacaggtggaggtagggccagcctggcgggagtggagaagcccagtctgtcctatgtaagggacaaagccaggtctaatggtactgggtagggggcactgccaagacaataagctaggctactgggtccagctactactttggtgggattcaggtgagtctccatgcacttcacatgttacccagtgttcttgttacttccaaggagaaccaagaatggctctgtcacactcgaagccaggtttgatcaataaacacaatggtattcc

SEQ ID NO: 18602 - protein, 753 aa, Homo sapiens; identical to SEQ ID NO: 17089

SEQ ID NO: 18603 - DNA, 1798 bp, Homo sapiens
  CDS (195)..(1709)
tggttggttgtgaagatggatctgtgaaactatttcaaattaccccagacaaaatccagtttgaaagaaattttgatcggcagaaaagtcgcatcctgagtctcagctggcatccctctggtacccacattgcagctggttccatagactacattagtgtgtttgatgtcaaatcaggcagcgctgttcataagatgattgtggacaggcagtatatgggcgtgtctaagcggaagtgcatcgtgtggggtgtcgccttcttgtccgatggcactatcataagtgtggactctgctgggaaggtgcagttctgggactcagccactgggacgcttgtgaagagccatctcatcgctaatgctgacgtgcagtccattgctgtagctgaccaagaagacagtttcgtggtgggcacagccgagggaacagtcttccattttcagctggtccctgtgacatctaacagcagtgagaagcagtgggtgcggacaaaaccgttccagcatcacactcatgacgtgcgcactgtggcccacagcccaacagcgctgatatctggaggcactgacacccacttagtctttcgtcctctcatggagaaggtggaagtaaagaattacgatgccgctctccgaaaaatcacctttccccaccgatgtctcatctcctgttctaaaaagaggcagcttctcctcttccagtttgctcatcacttagaactttggcgactgggatccacagttgcaacaggcaagaatggggatactcttccactctctaaaagtgcagatcatttactgcacctaaagacaaagggtcctgagaacattatctgtagctgtatctccccatgtggaagttggatagcctattctacagtttctcggttttttctctatcggctgaattatgaacatgacaacataagcctcaaaagggtttccaaaatgccagcattccttcgctctgcccttcagattttgttttctgaagattcaacaaagctctttgtagcatcaaatcaaggagctctgcatattgttcagctgtcaggaggaagcttcaagcacctgcatgctttccagcctcagtcaggaacagtggaggccatgtgtcttttggcagtcagtccagatgggaattggctagctgcatcaggtaccagtgctggagtccatgtctacaacgtaaaacagctaaagcttcactgcacggtgcctgcttacaatttcccagtgactgctatggctattgcccccaataccaacaaccttgtcatcgctcattcggaccagcaggtatttgagtacagcatcccagacaaacagtatacagattggagccggactgtccagaagcagggctttcaccacctttggctccaaagggatactcctatcacacacatcagttttcatcccaagagaccggtgcacatccttctccatgatgcctacatgttctgcatcattgacaagtcattgccccttccaaatgacaaaaccttactctacaatccatttcctcccacgaatgaatcagatgtcatccggaggcgcacagctcatgcttttaaaatttctaagatatataagcctctactcttcatggatcttttggatgaaagaacactcgtggcagtagaacggcctctggatgacatcattgctcagctcccaccacccattaaaaagaagaaatttggaacctaaaacagggcactgtctgtgtccttccttgaactgtctaccctgttgcttttcacaaatcatggtaataaaacaagttattcttgaat

SEQ ID NO: 18604 - protein, 505 aa, Homo sapiens [sequence omitted]

SEQ ID NO: 18605 - DNA, 3635 bp, Homo sapiens
  CDS (185)..(1612)
agcgatccgaggcccggccccggccccgccccgcgccgcgccgcgccgcttgccgccgggctagcactgacgtgtctctcggcggagctgctgtgcagtggaacgcgctgggccgcgggcagcgtcgcctcacgcggagcagagctgagctgaagcgggacccggagcccgagcagccgccgccatggcaatcaaatttctggaagtcatcaagcccttctgtgtcatcctgccggaaattcagaagccagagaggaagattcagtttaaggagaaagtgctgtggaccgctatcaccctctttatcttcttagtgtgctgccagattcccctgtttgggatcatgtcttcagattcagctgaccctttctattggatgagagtgattctagcctctaacagaggcacattgatggagctagggatctctcctattgtcacgtctggccttataatgcaactcttggctggcgccaagataattgaagttggtgacaccccaaaagaccgagctctcttcaacggagcccaaaagttatttggcatgatcattactatcggccagtctatcgtgtatgtgatgaccgggatgtatggggacccttctgaaatgggtgctggaatttgcctgctaatcaccattcagctctttgttgctggcttaattgtcctacttttggatgaactcctgcaaaaaggatatggccttggctctggtatttctctcttcattgcaactaacatctgtgaaaccatcgtatggaaggcattcagccccactactgtcaacactggccgaggaatggaatttgaaggtgctatcatcgcacttttccatctgctggccacacgcacagacaaggtccgagcccttcgggaggcgttctaccgccagaatcttcccaacctcatgaatctcatcgccaccatctttgtctttgcagtggtcatctatttccagggcttccgagtggacctgccaatcaagtcggcccgctaccgtggccagtacaacacctatcccatcaagctcttctatacgtccaacatccccatcatcctgcagtctgccctggtgtccaacctttatgtcatctcccaaatgctctcagctcgcttcagtggcaacttgctggtcagcctgctgggcacctggtcggacacgtcttctgggggcccagcacgtgcttatccagttggtggcctttgctattacctgtcccctccagaatcttttggctccgtgttagaagacccggtccatgcagttgtatacatagtgttcatgctgggctcctgtgcattcttctccaaaacgtggattgaggtctcaggttcctctgccaaagatgttgcaaagcagctgaaggagcagcagatggtgatgagaggccaccgagagacctccatggtccatgaactcaaccggtacatccccacagccgcggcctttggtgggctgtgcatcggggccctctcggtcctggctgacttcctaggcgccattgggtctggaaccgggatcctgctcgcagtcacaatcatctaccagtactttgagatcttcgttaaggagcaaagcgaggttggcagcatgggggccctgctcttctgagcccgtctcccggacaggttgaggaagctgctccagaagcgcctcggaaggggagctctcatcatggcgcgtgctgctgcggcatatggacttttaataatgtttttgaatttcgtattctttcattccactgtgtaaagtgctagacattttccaatttaaaattttgctttttatcctggcactggcaaaaagaactgtgaaagtgaaattttattcagccgactgccagagaagtgggaatggtataggattgtccccaagtgtccatgtaacttttgttttaacctttgcaccttctcagtgctgtatgcggctgcagccgtctcacctgtttccccacaaagggaatttctcactctggttggaagcacaaacactgaaatgtctacgtttcattttggcagtagggtgtgaagctgggagcagatcatgtatttcccggagacgtgggaccttgctggcatgtctccttcacaatcaggcgtgggaatatctggcttaggactgtttctctctaagacaccattgttttcccttattttaaaagtgatttttttaaggacagaacttcttccaaaagagagggatggctttcccagaagacactcctggccatctgtggatttgtctgtgcacctattggctcttctagctgactcttctggttgggcttagagtctgcctgtttctgctagctccgtgtttagtccacttgggtcatcagctctgccaagctgagcctggccaagctaggtggacagacccttgcagtgatgtccgtttgtccagattctgccagtcatcactggacacgtctcctcgcagctgccctagcaaggggagacattgtggtagctatcagacatggacagaaactgacttagtgctcacaagcccctacaccttctgggctgaagatcacccagctgtgttcagaattttcttactgtgcttaggactgcacgcaagtgagcagacaccaccgacttcctttctgcgtcaccagtgtcgtcagcagagagaggacagcacaggctcaaggttggtagtgaagtcaggttcggggtgcatgggctgtggtggtgttgatcagttgctccagtgtttgaaataagaagactcatgtttatgtctggaataagttctgtttgtgctgacaggtggcctaggtcctggagatgagcaccctctctctggcctttagggagtcccctcttaggacaggcactgcccagcagcaagggcagcagagttgggtgctaagatcctgaggagctcggggtttcgagctggctttagacattggtgggaccaaggatgttttgcaggatgccctgatcctaagaagggggcctgggggtgcgtgcagcctgtcggggagaccccactctgacagtgggcacacggcagcctgcaaagcacagggccaccgccacagcccggcagaggggcacactctggagaccttgctggcagtgctagccaggaaacagagtgaccaagggacaagaagggacttgcctaaagccacccagcaactcagcagcagaaccaagatgggccccaggctcctccatatggcccagggcttaccaccctatcacacgtggccttgtctagacccagtcctgagcaggggagaggctcttgagacctgatgccctcctacccacatggttctcccactgccctgtctgctctgctgctacagaggggcagggcctcccccagcccacgcttaggaatgcttggcctctggcaggcaggcagctgtacccaggctggtgggcagggggctggaaggcaccaggcctcaggaggagccccatagtcccgcctgcagcctgtaaccatcggctgggccctgcaaggcccacactcacgccctgtgggtgatggtcacggtgggtgggtgggggctgaccccagcttccaggggactgtcactgtggacgccaaaatggcataactgagataaggtgaataagtgacaaataaagccagttttttacaaggt

SEQ ID NO: 18606 - protein, 476 aa, Homo sapiens
MAIKFLEVIKPFCVILPEIQKPERKIQFKEKVLWTAITLFIFLVCCQIPLFGIMSSDSADPFYWMRVILASNRGTLMELGISPIVTSGLIMQLLAGAKIIEVGDTPKDRALFNGAQKLFGMIITIGQSIVYVMTGMYGDPSEMGAGICLLITIQLFVAGLIVLLLDELLQKGYGLGSGISLFIATNICETIVWKAFSPTTVNTGRGMEFEGAIIALFHLLATRTDKVRALREAFYRQNLPNLMNLIATIFVFAVVIYFQGFRVDLPIKSARYRGQYNTYPIKLFYTSNIPIILQSALVSNLYVISQMLSARFSGNLLVSLLGTWSDTSSGGPARAYPVGGLCYYLSPPESFGSVLEDPVHAVVYIVFMLGSCAFFSKTWIEVSGSSAKDVAKQLKEQQMVMRGHRETSMVHELNRYIPTAAAFGGLCIGALSVLADFLGAIGSGTGILLAVTIIYQYFEIFVKEQSEVGSMGALLF

SEQ ID NO: 18607 - DNA, 5107 bp, Homo sapiens
  CDS (13)..(4524)
ggagacccgaacatggcgaccgcgcgcaccttcgggcccgagcgggaagccgagccggccaaggaagcgcgcgtcgtgggctcggagcttgtggacacttatacggtttacatcatccaggtcactgatggcagccatgagtggacagtaaagcaccgctacagcgacttccatgacctgcatgaaaagctcgttgcagagagaaagattgataaaaacctgcttctgcccaaaaagataattgggaaaaactcaagaagcttggtggagaagagggagaaggatctggaggtctacctccagaagctcctggctgccttccctggcgtgacccccagagtactggcccacttcttgcattttcacttctatgagataaatggcatcaccgcggcactggctgaagagctctttgagaaaggagaacagctcctgggggccggcgaggtctttgccattggacccctgcagctgtatgccgtcacggagcagctgcagcagggaaagcccacgtgcgccagtggggatgccaagaccgacctcgggcacatcctggacttcacctgtcgccttaagtaccttaaggtttctggcacagaaggaccttttgggaccagcaacattcaggagcagctcctgccgttcgacctatcaatattcaagtccctgcatcaggtggagataagtcactgtgatgctaagcacatcagagggctggtcgcatcgaagcccaccttagccacgctgagtgtccgcttctcagcaacctcgatgaaggaagtccttgttcctgaagcctcagaatttgatgagtgggagcctgaaggcacaaccctagaaggccctgtgactgccgtcatccccacttggcaggcattgaccacgcttgacctgagccacaacagcatctccgagatcgacgagtctgtgaaactgatcccaaagattgagttcctggacctgagtcacaatggattgctggttgtggacaatctgcagcacctgtataaccttgtgcatctggacctgtcctacaacaagctctcctccttggaagggcttcacaccaagctggggaacatcaagaccttaaacctggcaggcaacctcctagagagtctgagtggcctgcacaagctctactcactggtcaacctggatctccgggacaacaggatcgaacagatggaggaggtccggagcataggcagcctcccgtgtctggagcacgtgtctctgctgaacaaccctctgagcatcatccccgactaccggaccaaggtgctggctcagttcggagagagggcctcagaggtctgtctggatgacacagtgaccacagagaaggagctggacactgtggaagtgctgaaagcaattcagaaagccaaggaggtcaagtccaaactgagcaacccagagaagaagggtggtgaagactcccggctctcagctgccccctgcatcagacccagcagctcccctcccactgtggctcccgcatctgcctccctgccccagcccatcctctctaaccaaggaatcatgttcgttcaggaggaggccctggccagcagcctctcgtccactgacagtctgactcccgagcaccagcccattgcccagggatgttctgattccttggagtccatccctgcgggacaggcagcttccgatgatttaagggacgtgccaggagctgttggtggtgcaagcccagaacatgccgagccggaggtccaggtggtgccggggtctggccagatcatcttcctgcccttcacctgcattggctacacggccaccaatcaggacttcatccagcgcctgagcacactgatccggcaggccatcgagcggcagctgcctgcctggatcgaggctgccaaccagcgggaggagggccagggtgaacagggcgaggaggaggatgaggaggaggaagaagaggaggacgtggctgagaaccgctactttgaaatggggcccccagacgtggaggaggaggagggaggaggccagggggaggaagaggaggaggaagaggaggatgaagaggccgaggaggagcgcctggctctggaatgggccctgggcgcggacgaggacttcctgctggagcacatccgcatcctcaaggtgctgtggtgcttcctgatccatgtgcagggcagtatccgccagttcgccgcctgccttgtgctcaccgacttcggcatcgcagtcttcgagatcccgcaccaggagtctcggggcagcagccagcacatcctctcctccctgcgctttgtcttttgcttcccgcatggcgacctcaccgagtttggcttcctcatgccggagctgtgtctggtgctcaaggtacggcacagtgagaacacgctcttcattatctcggacgccgccaacctgcacgagttccacgcggacctgcgctcatgctttgcaccccagcacatggccatgctgtgtagccccatcctctacggcagccacaccagcctgcaggagttcctgcgccagctgctcaccttctacaaggtggctggcggctgccaggagcgcagccagggctgcttccccgtctacctggtctacagtgacaagcgcatggtgcagacggccgccggggactactcaggcaacatcgagtgggccagctgcacactctgttcagccgtgcggcgctcctgctgcgcgccctctgaggccgtcaagtccgccgccatcccctactggctgttgctcacgccccagcacctcaacgtcatcaaggccgacttcaaccccatgcccaaccgtggcacccacaactgtcgcaaccgcaacagcttcaagctcagccgtgtgccgctctccaccgtgctgctggaccccacacgcagctgtacccagcctcggggcgcctttgctgatggccacgtgctagagctgctcgtggggtaccgctttgtcactgccatcttcgtgctgccccacgagaagttccacttcctgcgcgtctacaaccagctgcgggcctcgctgcaggacctgaagactgtggtcatcgccaagacccccgggacgggaggcagcccccagggctcctttgcggatggccagcctgccaagcgcagggccagcaatgaccagcgtccccaggaggtcccagcagaggctctggccccggccccagtggaagtcccagctccagcccctgcagcagcctcagcctcaggcccagcgaagactccggccccagcagaggcctcaacttcagctttggtcccagaggagacgccagtggaagctccagccccacccccagccgaggcccctgcccagtacccgagtgagcacctcatccaggccacctcggaggagaatcagatcccctcgcacttgcctgcctgcccgtcgctccggcacgtcgccagcctgcggggcagcgccatcatcgagctcttccacagcagcattgctgaggttgaaaacgaggagctgaggcacctcatgtggtcctcggtggtgttctaccagaccccagggctggaggtgactgcctgcgtgctgctctccaccaaggctgtgtactttgtgctccacgacggcctccgccgctacttctcagagccactgcaggatttctggcatcagaaaaacaccgactacaacaacagccctttccacatctcccagtgcttcgtgctaaagcttagtgacctgcagtcagtcaatgtggggcttttcgaccagcatttccggctgacgggttccaccccgatgcaggtggtcacgtgcttgacgcgggacagctacctgacgcactgcttcctccagcacctcatggtcgtgctgtcctctctggaacgcacgccctcgccggagcctgttgacaaggacttctactccgagtttgggaacaagaccacagggaagatggagaactacgagctgatccactctagtcgcgtcaagtttacctaccccagtgaggaggagattggggacctgacgttcactgtggcccaaaagatggctgagccagagaaggccccagccctcagcatcctgctgtacgtgcaggccttccaggtgggcatgccaccccctgggtgctgcaggggccccctgcgccccaagacactcctgctcaccagctccgagatcttcctcctggatgaggactgtgtccactacccactgcccgagtttgccaaagagccgccgcagagagacaggtaccggctggacgatggccgccgcgtccgggacctggaccgagtgctcatgggctaccagacctacccgcaggccctcaccctcgtcttcgatgacgtgcaaggtcatgacctcatgggcagtgtcaccctggaccactttggggaggtgccaggtggcccggctagagccagccagggccgtgaagtccagtggcaggtgtttgtccccagtgctgagagcagagagaagctcatctcgctgttggctcgccagtgggaggccctgtgtggccgtgagctgcctgtcgagctcaccggctagcccaggccacagccagcctgtcgtgtccagcctgacgcctactggggcagggcagcaggcttttgtgttctctaaaaatgttttatcctccctttggtaccttaatttgactgtcctcgcagagaatgtgaacatgtgtgtgtgttgtgttaattctttctcatgttgggagtgagaatgccgggcccctcagggctgtcggtgtgctgtcagcctcccacaggtggtacagccgtgcacaccagtgtcgtgtctgctgttgtgggaccgttgttaacacgtgacactgtgggtctgactttctcttctacacgtcctttcctgaagtgtcgagtccagtcctttgttgctgttgctgttgctgttgctgttgctgttggcatcttgctgctaatcctgaggctggtagcagaatgcacattggaagctcccaccccatattgttcttcaaagtggaggtctcccctgatccagacaagtgggagagcccgtgggggcaggggacctggagctgccagcgccaagcgtgattcctgctgcctgtattctctattccaataaagcagagtttgacaccgtc

SEQ ID NO: 18608 - protein, 1504 aa, Homo sapiens [sequence omitted]

SEQ ID NO: 18609 - DNA, 733 bp, Homo sapiens
gtgtgcaatgatggctgggggaatcgtcatgactgccaatctcaacatcaattataaaagacctatccctctttgttctgttgttatgataaatagccaacttgataaagttgaaggaaggaaattttttgtttcctgtaatgttcagagtgttgatgagaagaccctatactcagaggcgacaagcttatttataaagctgaatcctgctaaaagtctgacataaagagctgctggtgaactccatctcattctcgcccctccagaagaagcagttgtcccccaaatactctgctccctcactgctgaatccctgtagggagaagcctgccaacagtgaccttccgaaacagccttctgaatacaaagaggattcagtttccatcttctcaacttgttaacacagaaacacttcctgcgagcatatcgacaactctcgggccaggcgctgtggctcacacctgtaatcccagcactttaggaggccgaggcaggcggattgcctgagctcaggagttcaagatcagtctgggcaacacgatgaaactccgtctctactaaaatacaaaaaattatccaggcatggtggcgtacgcctgtagtcccagctactcaggaggctgaggcaggagaattgcttgaacccaggaggaagaggttgcagtgagccaagaacatgccacatcactccaacctgggcaacagaacaagaacccatctcaaacaaacaaac

SEQ ID NO: 18610 - DNA, 1241 bp, Homo sapiens
  CDS (169)..(690)
gtgctcggcgttgagctcctgcagccgccgccgctgcagtggtcgtccctgccctccccggccccggggtgcaccccgcaaggctcccgctggtgtccctggagcatgggaggctgctgagcgtgagtggcggtgtctggcaggagctgcgtggcagggagggcgtccatggctgcagccaacaagggcaacaagcccagagtccggagtatccgctttgcggcaggccacgatgcagaaggatcccacagccacgtccactttgatgagaagctgcatgactcggtggtcatggtcacccaggagagtgacagcagctttctggtcaaggttggcttcctgaagatcctgcacaggtatgagattaccttcactctgcccccagtgcacaggctgagcaaggatgtccgcgaggcacctgtccccagcctgcacctcaagctcctcagcgtggtgcccgtccctgaaggttatagtgtcaagtgtgagtactcggcgcacaaagagggcgtcctcaaagaggagatactgctagcctgcgaaggtggcactggcacctgtgtgcgcgtgacggtgcaggcccgcgtcatggaccggcaccacggcacgcccatgctgctggatggtgtcaagtgtgtgggcgccgagctggaatacgactcagagcacagcgactggcacggctttgactgaggcccgaggccccgcctgccccgggcccctcagccttaaaccccgccttgtccccccgacatgctgcgtgatggtgtggcttcctcgcccctctctggggtgggtgtgggggtggagtggccttgcccacgcctctcacctctgccttcatttgtgctgccaccctgcccctccctcgtcctcctctcccacttcctcctctctgtgtgcctcagtctcctgccggaagaaatgggttgagcccgaaaggaggctgtctgaggaagggagagggagggcctggggtgggtcccccactccccaccccaagccacagggactcccaccagggtctgggagaggacggagctggctctgtggcgtcgtggccccattactgctgccttgcttcagccacctctcctgcccctccctagtccccactgctgtccaccatgagtaggagggaggtgcagtccccagcccccacccctcaggtctgtgttacttggtttttaagcgactggttgggatagaaccctaaagaaataaacttccagtggataccg

SEQ ID NO: 18611 - protein, 174 aa, Homo sapiens
MAAANKGNKPRVRSIRFAAGHDAEGSHSHVHFDEKLHDSVVMVTQESDSSFLVKVGFLKILHRYEITFTLPPVHRLSKDVREAPVPSLHLKLLSVVPVPEGYSVKCEYSAHKEGVLKEEILLACEGGTGTCVRVTVQARVMDRHHGTPMLLDGVKCVGAELEYDSEHSDWHGFD

SEQ ID NO: 18612 - DNA, 2138 bp, Homo sapiens
  CDS (152)..(1732)
gctcccagggttgctagagctccttgtagaatatttccgacgatgcctgattgagatctttggcattttaaaggagtatgaggtgggtgacccaggacagagaacgctactggatcctgggaggttcagcaaggtgtctagtccagctcccatggagggtggggaagaagaagaagaacttctaggtcctaaactagaagaggaagaagaagaggaagtagttgaaaatgatgaggagatagccttttcaggcaaggacaagccagcttcagagaatagtgaggagaagctgatcagtaagtttgacaagcttccagtaaagatcgtacagaagaatgatccatttgtggtggactgctcagataagcttgggcgtgtgcaggagtttgacagtggcctgctgcactggcggattggtgggggggacaccactgagcatatccagacccacttcgagagcaagacagagctgctgccttcccggcctcacgcaccctgcccaccagcccctcggaagcatgtgacaacagcagagggtacaccagggacaacagaccaggaggggcccccacctgatggacctccagaaaaacggatcacagccactatggatgacatgttgtctactcggtctagcaccttgaccgaggatggagctaagagttcagaggccatcaaggagagcagcaagtttccatttggcattagcccagcacagagccaccggaacatcaagatcctagaggacgaaccccacagtaaggatgagaccccactgtgtacccttctggactggcaggattctcttgccaagcgctgcgtctgtgtgtccaataccattcgaagcctgtcatttgtgccaggcaatgactttgagatgtccaaacacccagggctgctgctcatcctgggcaagctgatcctgctgcaccacaagcacccagaacggaagcaggcaccactaacttatgaaaaggaggaggaacaggaccaaggggtgagctgcaacaaagtggagtggtggtgggactgcttggagatgctccgggaaaacactttggttacactcgccaacatctcggggcagttggacctatctccataccccgagagcatttgcctgcctgtcctggacggactcctacactgggcagtttgcccttcagctgaagcccaggaccccttttccaccctgggccccaatgccgtcctttccccgcagagactggtcttggaaaccctcagcaaactcagcatccaggacaacaatgtggacctgattctggccacaccccccttcagccgcctggagaagttgtatagcactatggtgcgcttcctcagtgaccgaaagaacccggtgtgccgggagatggctgtggtactgctggccaacctggctcagggggacagcctggcagctcgtgccattgcagtgcagaagggcagtatcggcaacctcctgggcttcctagaggacagccttgccgccacacagttccagcagagccaggccagcctcctccacatgcagaacccaccctttgagccaactagtgtggacatgatgcggcgggctgcccgcgcgctgcttgccttggccaaggtggacgagaaccactcagagtttactctgtacgaatcacggctgttggacatctcggtatcaccgttgatgaactcattggtttcacaagtcatttgtgatgtactgtttttgattggccagtcatgacagccgtgggacaccttccccccccgtgtgtgtgtgcgtgtgtggagaacttagaaactgactgttgccctttatttatgcaaaaccacctcagaatccagtttaccctgtgctgtccagcttctcccttgggaaaaagtctctcctgtttctctctcctccttccacctcccctccctccatcacctcacgcctttctgttccttgtcctcaccttactcccctcaggaccctaccccaccctctttgaaaagacaaagctctgcctacatagaagactttttttattttaaccaaagttactgttgtttacagtgagtttggggaaaaaaaataaaataaaaatggctttcccagtccttgcatcaacgggatgccacatttcataactgtttttaatggt

SEQ ID NO: 18613 - protein, 527 aa, Homo sapiens
MEGGEEEEELLGPKLEEEEEEEVVENDEEIAFSGKDKPASENSEEKLISKFDKLPVKIVQKNDPFVVDCSDKLGRVQEFDSGLLHWRIGGGDTTEHIQTHFESKTELLPSRPHAPCPPAPRKHVTTAEGTPGTTDQEGPPPDGPPEKRITATMDDMLSTRSSTLTEDGAKSSEAIKESSKFPFGISPAQSHRNIKILEDEPHSKDETPLCTLLDWQDSLAKRCVCVSNTIRSLSFVPGNDFEMSKHPGLLLILGKLILLHHKHPERKQAPLTYEKEEEQDQGVSCNKVEWWWDCLEMLRENTLVTLANISGQLDLSPYPESICLPVLDGLLHWAVCPSAEAQDPFSTLGPNAVLSPQRLVLETLSKLSIQDNNVDLILATPPFSRLEKLYSTMVRFLSDRKNPVCREMAVVLLANLAQGDSLAARAIAVQKGSIGNLLGFLEDSLAATQFQQSQASLLHMQNPPFEPTSVDMMRRAARALLALAKVDENHSEFTLYESRLLDISVSPLMNSLVSQVICDVLFLIGQS

SEQ ID NO: 18614 - DNA, 1934 bp, Homo sapiens
  CDS (64)..(1029)
ataaaaaaaaaaaaaaaaaaaaaaactataactccaccagaaaagttttttctttcccagctgatgctggcacccccacgggaactcttcaaaaagacgcctcgccagattgcactgatggacgttggaaacatgggccagtctgtggacattagtgggcttcagttagccttggccgaacgccaatctgaattgccaacgcaaagcaaagcgagcttccccagtattctcagtgacccagacccggattcttctaattctggatttgacagctcagttgcctctcagatcacagaagctttagtcagcggaccaaagccacctattgaaagccattttcgaccagagtttattcgtccaccgcctccactccacatttgtgaggatgaacttgcttggctaaaccccacggagcctgaccacgcgatccagtgggataaatcgatgtgtgttaagaatagcactggtgtggagatcaaacgaataatggccaaagccttcaaaagccccttatcctctccccaacaaacacagctacttggtgagttggaaaaagaccccaaacttgtctaccatattggcctcaccccagccaaacttcctgaccttgtggaaaacaaccctttagtcgctatagaaatgttgctgaaattaatgcagtcaagccagatcactgagtatttctctgtcctggtcaatatggacatgtctttacattcaatggaagttgtaaatcgactaactacagctgttgatctacctcctgaatttattcacctttatatatcaaattgcatctctacttgtgaacagattaaggataaatatatgcagaatcggttggtgcgtcttgtgtgtgtgtttctccaatccttgatccgtaacaaaattattaatgtacaggatttgtttatagaagtgcaggcattctgtattgaattcagtaggatacgagaagctgctggtcttttccggttgttgaagacattggatactggggaaacaccttctgagaccaaaatgtcaaaataatacctcatcagaaccatcccatccattcactgttcagctgtactgtgatttagtttttacaccgttaaaaccctgagtggattgcttggtttaatgcatataaacagtactttatctacttaaagcaaagttttgctttcttgaatgactttttctgtgagatgaatttttgataagaactagggaaaacatgtcttttaggtgtcttgctgatgactatccataggaggaatggctatcccaaaaaaagttccgcaaaaaagtagatgagtttcttttttttttaagcactaaagaacaaaatgcatttttcattaatacaggcttctgatgaaccaggaatcctgttttcgtaaagttccaatgttgatgagagtaaattcttaagcatttgtcctagaggtgaaagcagctgaatgtttctgaaccatcaagaggcaaacaaacaggagtttgtttcttgaacctgcttatgcacacagctcttaactcctcatgaggcacacagctcttaactcctgatgaaccaaggatttactcataactttctccttgtcatggaggcttaatagacaacagaataaatgcatttcttgggcctcttataaacttgggaattcttagaaagctgcttctattaccaggctgtaatagctggtatagttttttttttttctcttaagatgttctgttattagtctgagacagccatttttttgttttaaggaaaaatatcagtcagtgctccgggaggtaatttcctgtggggtctgcaccctcctgtctgggtggtggatgtgggtttgagaagtaggagagcagggtggtaccgtgtgggctcttaccctttatgtgattttggacaacagtgccttccattaaagttctttttatcaactgtt

SEQ ID NO: 18615 - protein, 322 aa, Homo sapiens
MLAPPRELFKKTPRQIALMDVGNMGQSVDISGLQLALAERQSELPTQSKASFPSILSDPDPDSSNSGFDSSVASQITEALVSGPKPPIESHFRPEFIRPPPPLHICEDELAWLNPTEPDHAIQWDKSMCVKNSTGVEIKRIMAKAFKSPLSSPQQTQLLGELEKDPKLVYHIGLTPAKLPDLVENNPLVAIEMLLKLMQSSQITEYFSVLVNMDMSLHSMEVVNRLTTAVDLPPEFIHLYISNCISTCEQIKDKYMQNRLVRLVCVFLQSLIRNKIINVQDLFIEVQAFCIEFSRIREAAGLFRLLKTLDTGETPSETKMSK

SEQ ID NO: 18616 - DNA, 2326 bp, Homo sapiens
  CDS (422)..(2128)
taaatttggtgaacataatgaatgtacagatgccctctaccagaaattagactttacagcacatcagagaattcacacagaagataaattctacctttctgatgaacatgggaaatgcagaaaatccttttaccggaaagcacacctcattcagcatcagaggccccactcaggagagaaaacttaccaatatgaggaatgtgcaaaatccttttgttcaagttcacatcctattcagcatcctggaacttatgtgggattcaaactttatgaatgtaatgaatgtgggaaagctttctgtcagaattcaaacctcagtaaacatctgagaattcacacaaaagagaaaccttgtgataacaatggctgtgggagatcttacaagtcacccctcataggacaccagaaaacagatgcagagatggaactctgtggtggcagtgaatatgggaagacatcacatctcaaaggacatcagagaattctcatgggggagaaaccctatgaatgtattgaatgtgggaaaactttctccaagacatcacatctcagagcacatcagagaattcacacaggtgaaaaaccctatgaatgtgttgaatgtgagaaaactttctctcacaagacacacctcagtgtacatcagagagttcacacaggggagaaaccctatgaatgtaatgactgtgggaaatcttttacctataactcagccctgagagcacatcaaagaattcacacaggtgagaagccctatgaatgcagtgactgtgagaaaacttttgcccataattcagccctcagagcacatcatagaattcacacgggggagaaaccttatgaatgtaatgaatgtggaaggtcttttgcccatatttctgttctcaaggcacatcaaagaattcacacaggggagaaaccctatgaatgtaatgaatgtgggagatctttcacctacaattcagccctgagagcacatcagagaattcacacaggtagaaaaccctatgaatgtagtgactgtgagaaaacttttgcccataattcagccctcaaaatacatcagagaattcacacgggggagaaaccctatgaatgtaatgaatgtgagaaaacatttgcccataattcagcccttagagcacatcagaatatccacacaggggagaaactctatgaatgtagtgaatgtggaaaaacttttttccagaagacacgcctcagtacacatcggagaattcacacaggggagaaaccctatgaatgtagcaagtgtgggaaaactttctcccagaaatcatacctcagtggacatgagagaattcacacaggggaaaaaccgtatgaatgtaacgtatgtgggaaaacttttgtctataaggcagccctcatagtgcatcaaagaattcacacaggggagaaaccctatgaatgtaaccaatgtgggaaaactttctcccaaagaacacacctctgtgcacatcagagaattcatactggggaaaaaccctatgagtgtaatgaatgtgggaaaacgtttgctgataattcagccctcagggcacatcacagaattcacacaggggagaaaccctatgaatgtaatgactgtgggaagactttctccaagacatcacatctcagagcacatcttagaactcgctcaggggagaaaccctatgaatgcagtgaatgtgggaaaaccttctctgagaagtcatatgttagtgcacatcagagagttcatacgggggagaaaccctacgaatgtaatgtatgtgggaagccatttgcccataattcaaccctcagagtacatcaaagaattcacacaggggagaaatcctatgaatgtaatgattgtgggaaaacgttctcccagaaatcacaccttagtgcacaccagagaattcacacaggggagaaaccctatgagtgtaatgaatgcggaaaagcttttgcccaaaattcaactctcagagtacaccagagaattcacacaggggagaaaccctatgaatgtgatgaatgtgggaaaacttttgtccgtaaggcagctcttagggtacatcacaccagaatgcataccagagagaaaaccctagcatgtaatggatttgggaagtcctgagggaatgcataccttaccacataacacatagtgcagaaactcatgtgacataggctgggaacttgtttcccttatccatttcctttttcattaggctcatagtttgtggaaaaatcccaatatgccgtttattcaggtggggctgaccatgggatgtggtgctaatgataaatattacatttacccttggccctt

SEQ ID NO: 18617 - protein, 569 aa, Homo sapiens; identical to SEQ ID NO: 17131

SEQ ID NO: 18618 - DNA, 2712 bp, Homo sapiens
  CDS (153)..(1763)
tgagaaagctgagaatcaatctcaatctgatttatgatcataaccctaaggtgtttcttggaaatgtggaaaccttcattaaacagatagattctgtggatcatattaacttgttttttacagaattgaaagaagaagatgtcacgaagaccatgtaccctgcaccagttaccagcagtgtctacctgtccagggatcctgacgggaataaaatagaccttgtctgcgatgctatgagagcagtcatggagagcataaatcctcataaatactgcctatccatacttacatctcatgtaaagaagacaaccccagaactggaaattgtactgcaaaaagtacacgagcttcaaggaaatgctccctctgatcctgatgctgtgagtgctgaagaggccttgaaatatttgctgcatctggtagatgttaatgaattatatgatcattctcttggcacctatgactttgatttggtcctcatggtagctgagaagtcacagaaggatcccaaagaatatcttccatttcttaatacacttaagaaaatggaaactaattatcagcggtttactatagacaaatacttgaaacgatatgaaaaagccattggccacctcagcaaatgtggacctgagtacttcccagaatgcttaaacttgataaaagataaaaacttgtataacgaagctctgaagttatattcaccaagctcacaacagtaccaggatatcagcattgcttatggggagcacctgatgcaggagcacatgtatgagccagcggggctcatgtttgcccgttgcggtgcccacgagaaagctctctcagcctttctgacatgtggcaactggaagcaagccctctgtgtggcagcccagcttaactttaccaaagaccagctggtgggcctcggcagaactctggcaggaaagctggttgagcagaggaagcacattgatgcggccatggttttggaagagtgtgcccaggattatgaagaagctgtgctcttgctgttagaaggagctgcctgggaagaagctttgaggctggtatacaaatataacagactggatattatagaaaccaacgtaaagccttccattttagaagcccagaaaaattatatggcatttctggactctcagacagccacattcagtcgccacaagaaacgtttattggtagttcgagagctcaaggagcaagcccagcaggcaggtctggatgatgaggtaccccacgggcaagagtcagacctcttctctgaaactagcagtgtcgtgagtggcagtgagatgagtggcaaatactcccatagtaactccaggatatcagcgagatcatccaagaatcgccgaaaagcggagcggaagaagcacagcctcaaagaaggcagtccgctggaggacctggccctcctggaggcactgagtgaagtggtgcagaacactgaaaacctgaaagatgaagtataccatattttaaaggtactctttctctttgagtttgatgaacaaggaagggaattacagaaggcctttgaagatacgctgcagttgatggaaaggtcacttccagaaatttggactcttacttaccagcagaattcagctaccccggttctaggtcccaattctactgcaaatagtatcatggcatcttatcagcaacagaagacttcggttcctgttcttgatgctgagctttttataccaccaaagatcaacagaagaacccagtggaagctgagcctgctagactgagtgactgcagttaggagggatccgacagagaagaccatttccactcattcctgttgtcctaccaccccttgctctttgagggctggctattgagaactggaaagagtaaaatgataacttaccttagcattgccaagaacttcagcagacaacaagcaattctatttattttatgttgtgtatacatcttgatcattagcaagacattaagctttaaccattatggcaccattttgtgagaatgattgttctttcacttgggctgtttgagagcataattatggtaatcatgagattaatgtttcatgatttctacctccaaagtgtgaagacaagtaaaacaatgtttctaaattgtcttattttgttggcggagaagattacaatggctattagtgctacatttggtcaaatgtaatcacttaaatagcttcttgtcaccttaaactaaagcagaataaaaagtatcctttgaaattataagccctcctttgctgacagctattattttgtaacatcttaccaggtcatgtgctttcagttataactgggctgagcctcctataattacaatgtctatagggactgttttactgcctgtgtattttctgctagagagttagcaatgttagagctagaacagattagaatttctaaacagtatcatgcacagttggtgtgagtgatcagtgtgcattgtatggcatgcatggttgtgaattattctctgttctccaaatactgtttctttaactcagatatttttgttagtgtctaggccacttcatttatttttcgtcatggtactttactgacttctctttattcaattctccacgccctcaccaaaaaaaactgtctcaaaatgagaatattttattttcatggtgagtctagaaaacgcccacttcattctgattaaaaattcttccatgttttaaatatc

SEQ ID NO: 18619 - protein, 537 aa, Homo sapiens
MYPAPVTSSVYLSRDPDGNKIDLVCDAMRAVMESINPHKYCLSILTSHVKKTTPELEIVLQKVHELQGNAPSDPDAVSAEEALKYLLHLVDVNELYDHSLGTYDFDLVLMVAEKSQKDPKEYLPFLNTLKKMETNYQRFTIDKYLKRYEKAIGHLSKCGPEYFPECLNLIKDKNLYNEALKLYSPSSQQYQDISIAYGEHLMQEHMYEPAGLMFARCGAHEKALSAFLTCGNWKQALCVAAQLNFTKDQLVGLGRTLAGKLVEQRKHIDAAMVLEECAQDYEEAVLLLLEGAAWEEALRLVYKYNRLDIIETNVKPSILEAQKNYMAFLDSQTATFSRHKKRLLVVRELKEQAQQAGLDDEVPHGQESDLFSETSSVVSGSEMSGKYSHSNSRISARSSKNRRKAERKKHSLKEGSPLEDLALLEALSEVVQNTENLKDEVYHILKVLFLFEFDEQGRELQKAFEDTLQLMERSLPEIWTLTYQQNSATPVLGPNSTANSIMASYQQQKTSVPVLDAELFIPPKINRRTQWKLSLLD

SEQ ID NO: 18620 - DNA, 1891 bp, Homo sapiens
cctttttctctaaggcaggaaaggaaagacattaaaccattaattaagtcaatcctcttggagactcaaaagactatgaagtgatcactctatataaaatataaatacagtgtgggttcaaatggccattttttgtgtgtccctctctctcatcttatgcttcccttcctttttttatttttattttttggagacggagtcttgctgtgtcgcccaggttggagtgcagtggcgtgatcttagctcactgcaagctctgccttccaggttcacgccattcttctgcctcagccccctgagtagctgggactacaggcgcccgccaccacgcccggctaattttttttttttttttttgtatttttagtagaggcagtgtttcaccgtgttagccaggatggtctcgatctcctgacctcgtgatccacccacctcgacctcccaaagtgctgggattacaggcgtgagccaccacgcccggcctcttttttttttagctgccaatctttttgaaggaatattcttacctctactttgtcaccttctactggctccttaactaaaatctgccatttggctctctggttaacagtcccttcctgtaaagtctaaaatcttaattctaaatccacagtttaattcacaagctagtacttgactttttttctgtatttgacatttttgacaaccccaaaaaaaaatactttaaagatttattcccttgacttcttacattttgctcactcctgaaccaccccccaccttttggcctcttcatttattccttaaatgttattcctcagacctccattttttttttctctcttaatcacaacaccacttctcacgcttgggtaattttaattcagcagttcctaaatccttatctttagccagactcctcaatccatctgcctgttgcacttttcttggttgtcccagagacacctgtgtgtgtcttaaaacattcattctctgcaaaacctactctaatgcctgtgtcccttactttggttaattttagaaccattatattctaagttttctaggctcattcctctcctccaccttcccctatcatttagtgtctaagttttactgattttatctccacctctctgatacatcactctttcatcttcattgctattattaataaatacctacagtactaacctgcctcctatacctagctggtctcctctctgttgctcaatgttaccacagcaggctttctagaagcactctgacagtgttactccctaatatccttcagtgacttcaggaactttcaggagaaagccaaactcctctgtttggtgtacaaggtcttctgatgtgtttcctccaccgaatgttctggtgaaacagacttacacttcttcagaagccacatttggccaggcctcccgccttggtaaatgctgtactctttgcatcaagtgtgctagtcatccttccccacttggaaaattcctatgcatcttgcaggcctgacataagcatttcctctgtgaaacctcctttgctccactcaaggagagtcatctaacttccactttcgtgtcaccactgtaattacaacctacctctattgtatgtcacttaaatcgtactgtattgttttatttttcaaaagtctttactagaatgtgagctccttaagggcaggaaaaggaacctttttattttttgcatctccatagcatagtttttggcatatgaatgtttaataaatgtttgttgaataaattgatcttaaagtgacatctttattatattagaggtcctacctatattccaaatactttcactcccttcactttacagcaagggtcagtagagtcccaaggatttgtagactttagggggtcaataaagctgaaattgt

SEQ ID NO: 18621 - DNA, 2171 bp, Homo sapiens
ggctccaaatgtccacttgcacattctacaaaaagagtgtttcaaagctgctcaatgaaaagtaaggttcaactctatgagatgaatgcacaaatcacaaagaagtctgtcagaatgcttctgtctaggttttatgtgaagatatttccttttccatgataggccccaaagcactccacaggtccagttgcagattctacaaaaagagtgtttcaaagctgctcaatcaaaagaaacgttcatctctgtgacatgaatgcacacatcacaatgaaatttatcagaatgcttctgtctagtttttttgtgaaaatatttccttttccaccataggcctcaaagtgctccaaatgtccacttgtagattctacaaacagagtgtttaaaaactgctaaatgaaaagaaagattcaactctgtgagatgaatacacacatcaagaagaagtttgtcagaatgcttctgtctagtttttatatgatgatatgtccttttccacaataggccagaaagtgctccaaatgtccacttgcagattcaacaaaaagagtgtttcaaagctgctcaatgtaaagaaaggttcaacactgtgagctgaatgcccacatctcaaagaagtttgtaagaatgcttctgtctagtttttatgtgaacatatttccttttccaccataggcctcaaagggctccacatgtcctcttgcagattctacaaaaagagggtttcaaagctgctcaattaaaagaacagttcaactctgtgtgagatgaatgcaaacatcgcaaagaagtttctcataatgcttctgtctagttttgttgggaagatatttccttttccaccatatgcctcaaagcgctccaaatgcacacttgcagattctacaaaaatggtgtttcaaaactgaccaatcaaaagtaaggttcaactctttgagatgaatgcagacatcacaaagtagtttttcagaatgcttctgtccagtttttatgtgaagatagtccttttctactataggcctcaaagcactcgaaatgtacacttgcagattctacaaaaagtgtgtttcaaagctgctcaatcaaaagaaaggttcaattctgtgagatgaatgcatgcatcatgaagaagtttgtcagaatgcttttgtctattttttttttttttttgtgagcaacaaggctgtttatttcacctgagtgcaggtgggctgagtccaaaaagagagcaaagggtgatcggattatcattagttcttataggttttggaataggcagtggagttaggagcaatgttttgcgggcaggagttggatctcacaaagtacattctcaagggtggggagaattacaaattacaaagaaccttctcaaaggtgagggagattacaaagaactttcttaagggtgggggagattacaaagtacatcagttagtgcgaagcagaaacaaaacacaatggtggaatgtcatcagttaaggctattttcacttcttttgtggatctgggacgtgaggagtgcctctgcctggacgcccattgtctgggatgtgaggagcgcctctgcccggccgccccatctgggaagtgaggagctcctctgcctggccaccccgtctgggaagtgaggagcgcctctgcccggccgccccatatgggaagtgaggagcgcctctgcctagccaccctgtctgggaggtctaccacagaggccagacgcagtgtgggggctggacgtggtggctcacgcctgtaatcccagcactctgggaggccaaggtgggttgatcacttggggctaggggttcgagaccagcctggccaacatggcaaaacatatgaaaattacaacaaaccaaacaaccaatcaaccaacccagcaacaacaaaacaggtctaccctggagtcatactctaaatttttctattttcctccctttctgatcctttatcccactttctttttcttcctcttccttctccttcttgtcaaagacatagaggattgagttattatcattgatcaatacaaagtccctctctcatttattttctttcattcccaccccccatttctattccccatcttcctgtgtgcaaccttcctaatatgtttgatatgcttctttttgtatatatttttagaaaatgttaaataaaaaaaattt

SEQ ID NO: 18622 - DNA, 3198 bp, Homo sapiens
  CDS (118)..(885)
gcagctgagaaggagccagtcccagttccagtccaggaaatagagattgactccaccacagaattggatgggcatcaggaagtagagaaagtgcagcctccaggccctgtgaaggagatggcccatggttcacaggaggcagaagctccaggagcagttgctggtgctgctgaagtccctagggaaccaccaattcttcccaggattcaggagcagttccagaaaaatcccgacagttacaatggtgctgtccgagagaactacacctggtcacaggactatactgacctggaggtcagggtgccagtacccaagcacgtggtgaagggaaagcaggtctcagtggcccttagcagcagctccattcgtgtggccatgctggaggaaaatggggagcgcgtcctcatggaagggaagctcacccacaagatcaacactgagagttctctctggagtctcgagcccgggaagtgcgttttggtgaacctgagcaaggtgggcgagtattggtggaacgccatcctggagggagaagagcccatcgacattgacaagatcaacaaggagcgctccatggccaccgtggatgaggaggaacaggcggtgttggacaggcttacctttgactaccaccagaagctgcagggcaagccacagagccatgagctgaaagtccatgagatgctgaagaaggggtgggatgctgaaggttctcccttccgaggccagcgattcgaccctgccatgttcaacatctccccgggggctgtgcagtttaatgaccagaaggaaaggaaaccctcgccggtggggaggcagagccttatcctcggctgcccttcttggctccctgcattccagggacttgctcgtcttgtttacccctagccatcctttctttcaagggtgaaccaggccttccaccctgaccttgcatctccagactgttccagagaaggtgcggggccagctgctatgtggtggccgctgtggctgacactgagtgaaggtgtttgaaatgcaggagaggatatcccagcaaattgggatcacatgcttttgtctccacagcaaccagccactgcaggcagcatgtctttcctcccctgctctctgcttgctgttgttttgacgctattctgcttgcatgtcttctggttgggatgtggagttgttgctggactctcaggcgaagctgaagtcattgaagtgtgtgaagctctgtgcgtgcatgagggcaagcaaggaatggctgtgcctgaggctgctctgggaaactccttgccccttgacctcttttgagagcattcacgtggtcttcttgctcatccccttataaatgtgctttgcctgcctcagcctcatggtcagagcagtggagactggagccctgtttgcacgttctagttgttcggagaaagcctaggttctgggctcaggtccagatgcagcggggattctgttctctgactgtggcgaccttgccttggttcttgttgaagtgaaccaagcccggccaccacgcatggcatgctgtgcttggctccccataagacgtcctctttgggtgcacggtgtcaaagtgtgggcaggagtggagagctggtgccctcaggaggagaccacagcatgtccatcagctcagcagagctcgacagccacaagtcctgagaagctttgaccttgaagggcttctgggagaggaggaatttctgcatggggcgtgaaggcacactgtcccaccacaactgaaccagaagagagtgaagactcccctcttcccatcctctgtgccaggtgccagactgtgctccttggaacttatggcccaatcttacctgttctccagggactggtcactgcctcaggacccccaagcctatgccctgagccatggctgctgactgactccagccaaggtgcaaagacgagattatgagacaggtcctcaggcctgtgttccaagtactcacaggggctctgggtgcccatcgccgggagtatggttcagctgccaccggcactgtccatttgcctgtctgtcaagctcagagcatggataagccacacagcagggcagtgcaccctggcaccatgcacggccagcaagaatcaaggcccgcagatgctaagagggcctattgtcaggggaaggtccccgctcctgcacactctctatggatacttgggttgtgggggctctcttggagagtaagtttgtggtttgtttctggtttacagtggtggctgacaccccttgtaagaaagcattcctgggaagtcttctgtgggtccaaacatgttgctccgatcatcacaggagagcaaaaggccctagataccccctttggaatgtgagagtcttgttgtctgatatttgccactgggctggtgaagcccctctaaagagatctcgaccctggggagcagaattcttgtcatctatgaggggtcctgagaaagacttgtcattttttttcctggagttcttcccattgaggtcctaggatttgcacaccactgtcccacaagagctttcctgcctaatgaaaggaggtcttgtggtgtgtgtctcctctcttctctatagttcccgagttggcccccattgcagcccccaccctgtgggtagtcttccagaagtgatgcagtggtgtgagatgccctacaccttgttatttgggagactttgagagtcattcacttccatggtgactagtgtttgttttgcctgattttatattctgtgttgcatttctccccactccctgccctgctttaataaacagcaaaccgatatctaggaagaatgactgagggatagtattgggtattggccccatggcaggaacagccacttgcatctggtcccggtgccacactgcggtgcttggtgtggttgtggagcctgtccctgcgcgccttgctcccgttgagccacgctgtctggtgggtgattctctgccctgagccaccaccctggactggcccagtctccagagctggcacaccctgcctgttttctctttttagacacaacagccgcagtttggccagccactaagtcccaccagctgaggtccgaggaaagcggggtgactcatttcccttgtccagggcccgaggagagtgaggtgtccagcctgcaaagctattccagctccttggtgttggtttgcaataaattggtatttaagc

SEQ ID NO: 18623 - protein, 256 aa, Homo sapiens
MAHGSQEAEAPGAVAGAAEVPREPPILPRIQEQFQKNPDSYNGAVRENYTWSQDYTDLEVRVPVPKHVVKGKQVSVALSSSSIRVAMLEENGERVLMEGKLTHKINTESSLWSLEPGKCVLVNLSKVGEYWWNAILEGEEPIDIDKINKERSMATVDEEEQAVLDRLTFDYHQKLQGKPQSHELKVHEMLKKGWDAEGSPFRGQRFDPAMFNISPGAVQFNDQKERKPSPVGRQSLILGCPSWLPAFQGLARLVYP

SEQ ID NO: 18624 - DNA, 1170 bp, Homo sapiens
  CDS (17)..(733)
acgtggattcagcgcgatgcccaaatccaagcgcgacaagaaagtctccttaaccaaaactgccaagaaaggcttggaattgaaacaaaacctgatagaagagcttcggaaatgtgtggacacctacaagtaccttttcatcttctctgtggccaacatgaggaacagcaagctgaaggacatccggaacgcctggaagcacagccggatgttctttggcaaaaacaaggtgatgatggtggccttgggtcggagcccatctgatgaatacaaagacaacctgcaccaggtcagcaaaaggttgaggggtgaggtgggtctcctgttcaccaaccgcacaaaggaggaggtgaatgagtggttcacgaaatacacagaaatggactacgcccgagctggtaacaaagcagctttcactgtgagcctggatccagggcccctggagcagttcccccactccatggagccacagctcaggcagctgggcctgcccaccgccctcaagagaggtgtggtgactctgctgtctgactacgaggtgtgcaaggagggcgatgtgctgaccccagagcaggctcgcgtcctgaagctttttgggtatgagatggctgaattcaaggtgaccatcaaatacatgtgggattcacagtcgggaaggttccagcagatgggagacgacttgccagagagcgcatctgagtccacagaagagtcagactcagaagatgatgactgaaagggactcgggactgaaggtctcctggaagcttctgggtctcactggaccatcaggactgctgccgcccctctggagagagcagctctttatttgtctgtagacagggaacatgatgggcactgacctcctgtaaagaataaagctgtgggccgggcgcggtggctcacgcctggaatcccagcactttgggaagccgaggtgggcagatcataaggtcaggagattaagaccatcctggctaacacggtgaaaccccgtctctactaaaaatagaaaaaaaaactagttgggcatagtggcatgtgcctgtagtcccagctactcaggaggctgaggcaggagaatcacttgaacccgggaggtggaggttgccgtgagttgagattggaccactgctctccagcctgggcaacagagtaaaactctgtccc

SEQ ID NO: 18625 - protein, 239 aa, Homo sapiens
MPKSKRDKKVSLTKTAKKGLELKQNLIEELRKCVDTYKYLFIFSVANMRNSKLKDIRNAWKHSRMFFGKNKVMMVALGRSPSDEYKDNLHQVSKRLRGEVGLLFTNRTKEEVNEWFTKYTEMDYARAGNKAAFTVSLDPGPLEQFPHSMEPQLRQLGLPTALKRGVVTLLSDYEVCKEGDVLTPEQARVLKLFGYEMAEFKVTIKYMWDSQSGRFQQMGDDLPESASESTEESDSEDDD

SEQ ID NO: 18626 - DNA, 2283 bp, Homo sapiens
  CDS (204)..(566)
acaaattccagccttctgtggtcgctgcggcctgtgttggggcctccaggatttgcctgcagctttctccctactggaccagagacctgcagaggatctcaagctattccctggagcacctcagcacgtgtattgaaatcctgctggtagtgtatgacaacgtcctcaaggatgccgtagccgtcaagagccaggccttggcaatggtgcccggcacaccccccacccccactcaagtgctgttccagccaccagcctacccggccctcggccagccagcgaccaccctggcacagttccagacccccgtgcaggacctatgcttggcctatcgggactccttgcaggcccaccgttcagggagcctgctctcggggagtacaggctcatccctccacaccccgtaccaaccgctgcagcccttggatatgtgtcccgtgcccgtccctgcatcccttagcatgcatatggccattgcagctgagcccaggcactgcctcgccaccacctatggaagcagctacttcagtgggagccacatgttccccaccggctgctttgacagataggccacctccagacctcacgaggaagccttggagatgtgggcagaggaagaggacactgaagaggagagctcagccaagtgaggcagcaggaggccatccctgaagagccttggaacgtggagggtctgtgctccttttaaataaaactgacccagagcaaaacattcaataacatacctcacccgagagcattcctctgagaaacgtctgccacgtgtggctagggtacaaaaggatggcttggtggccgtccccccacacaggggcccagtgaatcgagaaagacttgataagaggccaggagagtgggaactggacacagaccactgatctcaagcgtgtccagtttttagcattaaagacttttctattctttgctgatggcagctacaccgctgaaaaaggaggggcagcctggcgtgttctcaggacccccggaggatcccatattgggtgcttttctttccctggctctatgcagaggggcctgagttggtgtgtatgcctgagtgtttgccttgcgaggcacagtgggtggctgtcttgcctttgttttcgaaccaaaaaccattttcagccttttagatatgtcatgtgctgctgcttcccgaagtggtcttgctttctgtttcgtaagatgtcttgtttacacactgtatcagggatttggtgatacttgaaaattcctttggagaaaaaaacaaatttaattgccacactgcctgtcccacatgagggctgttaatttagaacccaagtttgaacccaacttgtgatggacccgcaggtaaccacagagcttcctttttgaaggcatatggttggagagaaccattttcccagctctcggttccggaagattccacgtcttggaggctgtgttcaccactagaactttaataactacccagggagggagaagctcgttgaaaggaagacaaagatttaaacagttcccacctctctccaccacatacttacagggcatgagtttaacccagtctaggctttgagtgtggctgatagcgaaggatagcaatgtggaaaatttgcttagtcccacctgtatttggggagtgggatgtacatgggcgtttgataccaccattgataggcaagcgactggttggatcaaaagccagtatttagggatctgcagcgagagggccctcaggaaggctctcgtaaccatgtgcaatatgtttttattctgactcgcagcttgtgctcagcatgttctttggtttagtttggggttgggggacacattgttcacccagcagaactgggaggtgcaaaggaccgtggaagcaatttttgttttgtttgaggaatacctgtcttggattccttagccccttgccagtcctggagactgtggcaggggccaccaggaaggcagctgtctgctgctgagtcagatcggaaggtggtgaatctttccagagcagctgaaaatctcagcatggagacagtaagaaaagagacggggtgtggataagactctgccaccgtgtcacactagcataggaggctgcacgttcatttgttgttgtttttttttcctttgccaacctccgttctatttatgtgcaagcagtttggattcaagttcttgtatctgtctgttctgggacctggggattgtgagggttccctcacagccagcacgacccccagaaagaggcgtcccacaataaacacgtcacctgct

SEQ ID NO: 18627 - protein, 121 aa, Homo sapiens
MVPGTPPTPTQVLFQPPAYPALGQPATTLAQFQTPVQDLCLAYRDSLQAHRSGSLLSGSTGSSLHTPYQPLQPLDMCPVPVPASLSMHMAIAAEPRHCLATTYGSSYFSGSHMFPTGCFDR

SEQ ID NO: 18628 - DNA, 2633 bp, Homo sapiens
  CDS (447)..(1994)
ggcttctgtactgcgcgcgcacatgcgcgcaaacccggaagcggattatgtggagtgaaagttacaccgtggcggaatggggtgtattgattctgagcaataaacaacacatttttaacattcaggattgacttctaaggactcttggtacatgaggaagaaacccggaaggggaagaggaaagcaaaggcgtcaggaatggttcttcctcaggtattttttctaaatgtgagatcaaggaattaccaccaaaaaaggagagtaatacaggagaaatattccagacagtaatgttggaaagacatgaaagccacgacatacaagatttttgcttcagagaaacccagaaaaatgtacatgactctcagtgtctgtggaaacatgattgaagacattataagcgagtgcgtgtgacctataaggaaagtctcattggtagaagagacatgcatggtagaaaggatgatgcacaaaagcagcctgttaaaaatcagcttggattaaacccgcagtcacatctaccagaactgcagctatttcaagctgaagggaaaatatataaatatgatcacatggaaaaatccgtcaacagtagttccttagtttccccaccccaacgtatttcttctactgtcaaaacccacatttctcatacatatgaatgtaattttgtggattcattattcacacaaaaagagaaagcaaatattgggacagaacactacaaatgtaatgagcgtggcaaggcctttcatcaaggcttacattttactatacatcaaataatccatactaaagagacgcaatttaaatgtgatatatgtggcaagatcttcaataaaaaatcaaaccttgcaagtcatcaaagaattcatactggagagaagccatataaatgtaatgaatgtggcaaggtcttccataatatgtcacaccttgcacagcattgcaggattcatactggagagaaaccatataaatgtaatgaatgtggcaaggtctttaatcaaatttcacaccttgcacaacatcaaagaattcataccggagagaaaccttataaatgtaatgaatgtggaaaggtcttccatcaaatttcacaccttgcacaacatcggacaattcatactggagaaaaaccttacgaatgtaacaaatgtggcaaggtgttcagtcgcaatacctaccttgtacaacatctgatcattcatactggagagaaaccttacagatgtaatgtatgtggaaaggtcttccatcatatttcacaccttgcacaacatcagagaatccacactggagagaaaccttacaaatgtaatgagtgtggcaaggtcttcagtcacaagtcatccctagtaaatcactggagaattcatactggagagaaaccttacaaatgtaatgagtgtggcaaggtcttcagtcacaagtcatccctagtaaatcactggagaatccacactggagagaaaccttacaaatgtaatgaatgtggcaaggtcttcagtcgcaattcataccttgcccaacatctgataattcatgccggtgagaaaccttataagtgtgatgaatgtgacaaagcattcagtcaaaattcacatcttgtacaacatcacagaatccatactggagagaaaccttacaaatgtgatgaatgtggcaaagtcttcagtcaaaattcataccttgcatatcattggagaattcatactggagaaaaagcttataaatgtaatgaatgtgggaaggtcttcggtctaaactcacccctagcacatcatcggaaaattcacactggagagaaacctttcaaatgtaatgaatgtggcaaagcttttagtatgcgttcaagcctcactaatcatcatgcgatccacactggagagaaacatttcaaatgtaatgaatgtggcaaactcttccgcgacaattcatatcttgtacgtcatcagagatttcatgccggaaagaaatctaacacatgtaattaatgtggcagagtgttcagttagcattaaagccctgtaagacatacaataatttatactggagaaaaactttgcaagtataatgaatgtagcagagcctttagtttttgttcaaggcttaataaccgttagctagaccatagaggacagaaactttactaatgtactgaatgtggcaaggtcttaaggtaaaatctgagaccaggatttttcaaagaattcttgctggtgagaaacctaacaaatgtaatgaatgtggcaaggtcttctggcacaattctcacattgtacaatattgcaaaaattcatgcttgagagaaacaaaaacactgagagtgggaaaccattatgacttcaaacattcatcaacatcagagaatccatactaaagagcatttataataattatatgtgatagagattttccacaggccaaagtctcactaggcatcaaaaacttttttgatgaaaccatacaaatgtaacgtgcatgcttaagcttttacccaggcatcaaaaccggaacatcacagggtttatactggagagtaactacacaaagataatgtaataagcctttcagtgtaatattcatgattttgtcgtgagagatccactcaataaaaaccaggcaaatgt

SEQ ID NO: 18629 - protein, 516 aa, Homo sapiens
MHGRKDDAQKQPVKNQLGLNPQSHLPELQLFQAEGKIYKYDHMEKSVNSSSLVSPPQRISSTVKTHISHTYECNFVDSLFTQKEKANIGTEHYKCNERGKAFHQGLHFTIHQIIHTKETQFKCDICGKIFNKKSNLASHQRIHTGEKPYKCNECGKVFHNMSHLAQHCRIHTGEKPYKCNECGKVFNQISHLAQHQRIHTGEKPYKCNECGKVFHQISHLAQHRTIHTGEKPYECNKCGKVFSRNTYLVQHLIIHTGEKPYRCNVCGKVFHHISHLAQHQRIHTGEKPYKCNECGKVFSHKSSLVNHWRIHTGEKPYKCNECGKVFSHKSSLVNHWRIHTGEKPYKCNECGKVFSRNSYLAQHLIIHAGEKPYKCDECDKAFSQNSHLVQHHRIHTGEKPYKCDECGKVFSQNSYLAYHWRIHTGEKAYKCNECGKVFGLNSPLAHHRKIHTGEKPFKCNECGKAFSMRSSLTNHHAIHTGEKHFKCNECGKLFRDNSYLVRHQRFHAGKKSNTCN

SEQ ID NO: 18630 - DNA, 2700 bp, Homo sapiens
  CDS (908)..(1225)
gatgcagcagctggctgaaggctccagagggttccccgaggtgggactggcctctccccgtgtgtgtgggcaccacagtccctgggcaagcagggtgctctgggaccgcacttcatcgagctcacgagccagctaggctctgtttgtgatagaaaaatcaagaccatgttaatgatcgtaataaaagctttctactgtcgttggggtggtgggtggggctgggaagaaactggtttgagcttttagagtttgcctttgtaccttagagatgtgtctcagggccaggcatgggacctgccatcgagggttcctccccgcaccctcgattttcctgttttgcttctctctccatttctgtccaggcctccgcccaattccacagtgaggggtggttaggagctatgggccgggatggctccttgggaagggaagtcgggatcccaggctaggaggaagctggcagccccgtccccactgggcccacagtgtgagtcgtgccttagagactccgggttgtcctgttctttctgggcttgctcatctccccccaaccctgtcccaccccacccctcccatacctccactgctgaagttcctccagcccctctgtctgccttgtgaaggtggcaggggccaggtctgcctgacataggaccacatcctgtccctccctcacctggagcagcacagcagagttcaggcaaggcacagccaggccctggtcagcgctgaatggcagaggaaagatcttaggaaaggagaggaatcgccaccccctcctgccaactgggatgactggggagggccacgctcattcaaagctgaatcagaaaccagccgtggaacagaattcctgccgagtcttccagggccgctcctccaccaccctcccccaggttgaggcactatggcaccctcatcagggagaggtttggggtccccttgttgtcactgctggctctgccaccccatcttgttcatggcagctggttgggtcaggtccatggtagagccaggcccttcccagggctgcggagaaaacctgctctcttctagtcgggcttctccagaagccagtaatcagaaaggatgtgtctcctgctccaactctgcccccgagacagctcagagccagaaggcaccccgagacagctcagagccagaaggcaccccgagacagctcagagccagaaggcaccgaggactctggcccaagtggggaagctgaggcagagagcagagggggtcatgcagtgagtgggtggggtgcaggagacagagaggggctgggggcgtggggtgggggtgtctgcctcttccctccacctcctcccctccttagcagctgaagactcagccctgaggtctggggcaatggaagtcaagacacccgacccctacatcctggggtaggcccgactcagcatcctgtcccagcttcagccccacactcatttctggcatagaagattccgccgaggcagctctttcctctcggggtctgccaggggtgcctcagctggttcctgctcccaggcctagccccgaagccttaggggccttctcagccttagccctgggtactggggtgaagttggcaggggagagcttgacacttcgcctccctgatggccatgctgagggacagtggtgaccctggtcacttggtgctggtgtaggggcctgtgcccttccagggccagtgagacagccttctactcccccgacccagagctgagtccgaggaccccaggcccacctcctggccctcttggaggtctgtgctcttacctcccagcccccaccctgcgggagagcagccccagcgcctcatctccccaaaggcggcagatgcttgattctcctgccctctttcttccttccctcgtatttatttatttatttattgcttgtgctaaagaccaaaatagtctccctctttagtgcacttgaagcgggagggcggatgggatgagccaggagcgaggaagacttggcccctggggagtgtgtgtgtggaggcgtgtgcctgtgtgagcctgcatgcatacatgtgtggtgcacacatgcacactcggctcttcatgtgtatgactgggttagtaatacagatacgtgatctatacgtgtgtgtgtgtgtgtgtgtgtgtgtgtgtgtgtgtatgcaggcggttatgtgtctgtctacccccaggtgtttccgtgtacaagtttcctgtgagggagggcacccacccatcaggttgggcactggcacaggtgaaccccacagtccccgaccctctgccctgattatgcacgtctgctcctgagtggagcttgtgttccaggatgagacatctggaggtgagcgtgtgcgtccggctcgtgtgtaggaggctgtgtgtgtgcccatgtgaaaccgtgtacttgagtgtgtgtctgtgtgcagcctatgcctgctgctcagagcacggtggccaccccctgagcctctgctggtgctgtgctgcgtggtccccacccagagggtcctggggggcggggaggagccaccgttgggaggcccctgtacggggtgtctgccctgcgtgagggcatagaatgtcaaattattttaaatggtgaaactggagagttttcatgttattttcaatacatagcagtatctaaagacgtaggcgatgagactagaccacattaaatgcattttgatctctt

SEQ ID NO: 18631 - protein, 106 aa, Homo sapiens
MAPSSGRGLGSPCCHCWLCHPILFMAAGWVRSMVEPGPSQGCGENLLSSSRASPEASNQKGCVSCSNSAPETAQSQKAPRDSSEPEGTPRQLRARRHRGLWPKWGS

SEQ ID NO: 18632 - DNA, 2165 bp, Homo sapiens
  CDS (164)..(1252)
agaagagaaagtcaatgaaattaaagaagacagtcattgtggagaaacttttaccccagttccagatgacaggctgaacttccagaagaagaaagcttctcctgaagtaaaatcatgtgacagctttgtgtgtgaagttggcctaggtaactcatcttctaatatgaacatcagaggtgacactggacacaaggcatgtgaatgtcaggaatatggaccaaagccatggaagagtcaacaacctaaaaaagccttcagatatcacccctccttgagaacacaagaaagggatcacactggaaagaaaccctatgcttgtaaagaatgtggaaaaaacattatttaccattcaagcattcaaagacacatggtagtgcacagtggggatggaccttataaatgtaagttttgtgggaaagcattccattgtctcagtttatatcttatccatgaaagaactcacactggagagaaaccgtatgaatgtaaacaatgtggtaaatcttttagttattctgctacccatcgaatacatgaaagaactcacattggagaaaagccttatgaatgtcaggaatgtgggaaagcattccatagtcccagatcctgtcacagacatgaaaggagtcacatgggagagaaggcttatcaatgtaaggaatgtggaaaagcattcatgtgtccccgttatgttcgtagacatgaaaggacccactctaggaaaaaactttatgaatgtaagcagtgtgggaaagcattatcctctcttacaagttttcaaacacacataagaatgcactctggagaaagaccttatgaatgtaagacatgtgggaaaggcttttattctgccaagtcatttcaaagacatgaaaaaactcacagtggagagaaaccgtataaatgcaagcaatgtggtaaagccttcactcgttccggttcctttcgatatcatgaaaggactcacactggagagaaaccctatgagtgtaagcaatgtgggaaagccttcagatctgccccaaatcttcaattgcatggtaggactcacactggagagaaaccgtatcaatgtaaggaatgtgggaaagctttcagatctgcctcacaacttcgaatccatcgtaggattcacactggagagaaaccctatgaatgtaagaaatgtgggaaagccttcagatatgtccagaactttcgatttcatgaaaggacacaaacacataagaatgcactctggagaaagaccttataaatataagatatatgggaaacacttttattctgccaagttatttcaaacacatgaaaaaattcacactggagagaaaccctataaatgcaagcaatgtggtaaagccttaattgttccagttcctttcgatatctaaaaggactcacagtggagaaaaactctatgagtgtaagcaatgtgggaaagtcttcagatctgtcaagaacctttcaatttatgaaaggacacacactggagagaaaccctatgaatgtaagaaatgtggaaaagcgttccataatttctcttcttttcaaatacatgaaagttgcacagaggagaggcgccctaagaatgtaagcattgtgggaaagcattcatatctgccaagatcgtttgaatacatgcaaaacacacactggagagaaacctatgaatgtaaggaatgcaaacaagcattcaattatttttcttccttgcatatacatgaaaggactcatacgagagagaatccgtatgaatgtaaggattgtgggaaagcattcagcttgcttaattgctttcatagacatgtaaagacacaccagaaggaaaccctatgaatgtaagtaatgtggcaaaagctttcacttcttccagttcttttcaatatcatgaaaggactcacactggggagaaaccgtatcaatgtaagcaatgtgggaaagccgtcagatcagcctcaagacttcaaatgcatggaagcactcacacttggcagaaactctatgaatgtaagcagtatgggaaagccttcagatcggctaggattctttgaatacaaataatgaatgtaaacaattaactgtttataataactgtatactaacaaatgttattctttttaaataattaagaagctataataaaatatccattggtgtcatgtatt

SEQ ID NO: 18633 - protein, 363 aa, Homo sapiens
MNIRGDTGHKACECQEYGPKPWKSQQPKKAFRYHPSLRTQERDHTGKKPYACKECGKNIIYHSSIQRHMVVHSGDGPYKCKFCGKAFHCLSLYLIHERTHTGEKPYECKQCGKSFSYSATHRIHERTHIGEKPYECQECGKAFHSPRSCHRHERSHMGEKAYQCKECGKAFMCPRYVRRHERTHSRKKLYECKQCGKALSSLTSFQTHIRMHSGERPYECKTCGKGFYSAKSFQRHEKTHSGEKPYKCKQCGKAFTRSGSFRYHERTHTGEKPYECKQCGKAFRSAPNLQLHGRTHTGEKPYQCKECGKAFRSASQLRIHRRIHTGEKPYECKKCGKAFRYVQNFRFHERTQTHKNALWRKTL

SEQ ID NO: 18634 - DNA, 2616 bp, Homo sapiens
  CDS (1153)..(1515)
gttttcagtaacattcccacagtgcttgccacagagccctgcttaaagaaagcaccagttcctggcctgcagacccactaaatgaagatgatagtggtacctcttcccctgcccaacaccacgccctctggcacaaggtggatggccactggcagtgatggggatggagtaagtgctatgagactaggagaggaacaccccaggaacacctgaggtcacagagtgaatgaaggcaggtaaaggagcaaagggaatgggggcccccacatacgtgaccccagggcagcagcttggcctgcaccgagtcctccatcacacacactcccccgccccacccccgcatcctggctgtctaaccacaatccctgctgccttcagttaatcaaccaatgagtggtcattcattgcacatctgttctgggcctcatgggggcagcgggaggtgatgaagaagcaagggttctacaaagaggtcaaagctacgtgaggagccggggaatggcttgcttttttttttttttttttttagacgggctctcactctgtcacccaggctggagtgcagtggcatgatcattgctcactgcagcgatgtctcatgggctcaagggatcctgccatctcagcttcccaaggggctgggaccaaaagtgtgtgccaccatggcctgctatttttttttttatttcttggagagatgggctcaagcatctacacacctcagcctcctaaagtgctgggattatagctgtgagccgttgcacctggccaggatggctttttttgaaagtgaggacacgaaagttcagaaaggggaagaaactggctgtggtcctgcagcaagctggcagccgtccctcacctagccctgcgcttcagaaccttactcacagatcatcttacaaatgcctctttgctactttgtgagggaggcaggaattactcttcacccttatcagatgagaaaaccaaggcccagtgaggtagctgaggctgtctaaggttacatgggagtcaggaagggtcaagactaaacccaggtccacgtggttccagcctggcttcatccctgtttgcagaccccccaatcccaacccgccactggccagagcctggcccagctcttaggccaatgtcttattccaaaattaaatggcagcagcagaggaagggatagattggggggtagctgcccccagatgccaggacctatgccctggagaaacccttgggctggggatagctgtgacatgtacacacataccttgggccccttgtctcacccactctgagccaactcaggacccagtgggggctcactccactaatttggagcctgggctctgcctccacttctctctgccctgggaactccatctgcctccagggcctcctgaagacacgcaggggagagttcagtatttctcccttcctgtctccagtgtctgcaacagcaaatcctatcattgccgctccaaatttttctcaaagaggaagccttctttcttgctgaaatagaaactaaaccaagctacataatacagtttgagaacagcctggccaacgtgatgaaaccccatctgtactaaaaatacaaaaattagccgggtgtggtggcgcgtgcctgtagtctcagctactccagagcctgaggcaggagaatcgcttgaacccgcgaggcggaggttgtcgtgagcctagatcatgccactgcactccagcctgggcgacagagcgagactccatctcaaaaaaaaaaaaaaaaatgatgaggtcatactacagtgtgtgaacccctaatcctataggactgttcgcctttgaaaaggggaaatttagacacagaaacagccatgcaaagagggaagatgatgtgaagaggcacagctcagacacccatcttcaaggcaaggagagaggcctggaacagatcagaaggaatcaacctgccaactccttcatttcagactgctagccacaggaactgttgtttaaaccacccagtctgtgattctttgttatggcagccctagcaaactaaccagcaatgccatcttcatctgattctctttaaatactccaagcaggagaccagttaccatttaagtccaactaccccaagaatatcagactggggaggccacatgtaggtacaatggtcaacagccccggctgaactcaacagccagcactagcatgcgaatgagccttctcaggcatcagcccagtggatcgttaaccacaaccctgccaacctctgatagtatccgcatgtgagactcaaagcaagaactgccagggggagcacttcctgatcctgacccacaaaatcctgagtgatgtacaatggttgcttgaagctgccaagttttagggtaacttattatacaacatagtaaccagagtgcttaccttccccttccctcccttgccactggccggaacacagatgaggccatggtgggctgtcttcagtcctgtaaatgacatagatgagggcatggggaagccacaaacgaggagcctgggctcttggatgccctcatggagcacaactgccaactccccacgtgccactcacatttcatgcaagagaaataaatttccatcttgttt

SEQ ID NO: 18635 - protein, 121 aa, Homo sapiens
MAAAEEGIDWGVAAPRCQDLCPGETLGLGIAVTCTHIPWAPCLTHSEPTQDPVGAHSTNLEPGLCLHFSLPWELHLPPGPPEDTQGRVQYFSLPVSSVCNSKSYHCRSKFFSKRKPSFLLK

SEQ ID NO: 18636 - DNA, 3095 bp, Homo sapiens
  CDS (1383)..(2333)
aagacgcagtcttcagcaaggaagtgctgggaacgccctggagtgaacccaggaagatgcctgcagtgggtgccagggcccctctccaccgtccctgctgggcttcggggccacgcccgactgctgtgaacggcctgcggagcaccacgtgcgacggctggaggcgagaggtctgcctttgatgtggctgttggtgcagggcctgtggtgccttccgcagcggaaatggcgcgccgcccggggagggcgggagcagcgtcccgggtgcccctgtgaggatgagcgacgagatgactggagggtccctgaagacctcactagggtgcccccagccggtccgctcccaggaagcgacacccccacagccccagggctgcagctgagggggtcgccactctggctgggcgaggctgggcccttgggggcaggcgccagagtggcctcaggctctacaagatgcctgaaaacaccaacctctccagggctcactagcattggacgctttcacgctctgccctggccggaagccccctcaccccgcgcgatgtgcaaactcctgcagggctcactcagtttccagaactttaattattggaaagttctccctggtccagcccccaaatctgccgtgaacgttgacagctgagttgctgctccatgcgtgctttggctgagagcagaggggacccctgtcctccctgagctgctgacgaggggaggggtgaagggtggggcctctggagagggcaggtcccggggaagctccggactcctagaggggcggccaggtggaggccctggtgaccaggacagactgtggtgtttttttaacgtaaaggagatccgcggtgtgagggaccccctgggtcctgcacgccgcctggtggcaggccgggccatggtgggtgctcacgcccccggcatgtggccgccctcagtgggaggggctctgagaacgactttttaaaacgcagagaaaagctccattcttcccaggacctcagcgcagccctggcccaggaaggcaggagacagaggccaggacggtccagaggtgtcgaaatgtcctggggacctgagcagcagccaccagggaagaggcagggagggagctgaggaccaggcttggttgtgagaatccctgagcccaggcggtagatgccaggaggtgtctggactggctgggccatgcctgggctgacctgtccagccagggagagggtgtgagggcagatctgggggtgcccagatggaaggaggtaggcatgggggacacccaaggccccctggcagcaccatgaactaagcaggacacctggaggggaagaactgtggggacctggaggcctccaacgactccttcctgcttcctggacaggactatggctgtgcagggatcccagagaagacttctgggctccctcaactccacccccacagccatcccccagctggggctggctgccaaccagacaggagcccggtgcctggaggtgtccatctctgacgggctcttcctcagcctggggctggtgagcttggtggagaacgcgctggtggtggccaccatcgccaagaaccggaacctgcactcacccatgtactgcttcatctgctgcctggccttgtcggacctgctggtgagcgggagcaacgtgctggagacggccgtcatcctcctgctggaggccggtgcactggtggcccgggctgcggtgctgcagcagctggacaatgtcattgacgtgatcacctgcagctccatgctgtccagcctctgcttcctgggcgccatcgccgtggaccgctacatctccatcttctacgcactgcgctaccacagcatcgtgaccctgccgcgggcgcggcgagccgttgcggccatctgggtggccagtgtcgtcttcagcacgctcttcatcgcctactacgaccacgtggccgtcctgctgtgcctcgtggtcttcttcctggctatgctggtgctcatggccgtgctgtacgtccacatgctggcccgggcctgccagcacgcccagggcatcgcccggctccacaagaggcagcgcccggtccaccagggctttggccttaaaggcgctgtcaccctcaccatcctgctgggcattttcttcctctgctggggccccttcttcctgcatctcacactcatcgtcctctgccccgagcaccccacgtgcggctgcatcttcaagaacttcaacctctttctcgccctcatcatctgcaatgccatcatcgaccccctcatctacgccttccacagccaggagctccgcaggacgctcaaggaggtgctgacatgctcctggtgagcgcggtgcacgcggctttaagtgtgctgggcagagggaggtggtgatattgtgtggtctggttcctgtgtgaccctgggcagttccttacctccctggtccccgtttgtcaaagaggatggactaaatgatctctgaaagtgttgaagcgcggacccttctgggtccagggaggggtccctgcaaaactccaggcaggacttctcaccagcagtcgtggggaacggaggaggacatggggaggttgtggggcctcaggctccgggcaccaggggccaacctcaggctcctaaagagacattttccgcccactcctgggacactccgtctgctccaatgactgagcagcatccaccccaccccatctttgctgccagctctcaggaccgtgccctcgtcagctgggatgtgaagtctctgggtggaagtgtgtgccaagagctactcccacagcagccccaggagaaggggctttgtgaccagaaagcttcatccacagccttgcagcggctcctgcaaaaggaggtgaaatccctgcctcaggccaagggaccaggtttgcaggagcccccctagtggtatggggctgagccctcctgagggccggttctaaggctcagactgggcactggggcctcagcctgctttcctgcagcagtcgcccaagcagacagccctggcaaatgcctgactcagtgaccagtgcctgtgagcatggggccaggaaagtctggtaataaatgtgactcagcatcaccc

SEQ ID NO: 18637 - protein, 317 aa, Homo sapiens
MAVQGSQRRLLGSLNSTPTAIPQLGLAANQTGARCLEVSISDGLFLSLGLVSLVENALVVATIAKNRNLHSPMYCFICCLALSDLLVSGSNVLETAVILLLEAGALVARAAVLQQLDNVIDVITCSSMLSSLCFLGAIAVDRYISIFYALRYHSIVTLPRARRAVAAIWVASVVFSTLFIAYYDHVAVLLCLVVFFLAMLVLMAVLYVHMLARACQHAQGIARLHKRQRPVHQGFGLKGAVTLTILLGIFFLCWGPFFLHLTLIVLCPEHPTCGCIFKNFNLFLALIICNAIIDPLIYAFHSQELRRTLKEVLTCSW

SEQ ID NO: 18638 - DNA, 3881 bp, Homo sapiens
  CDS (3052)..(3711)
atttttttcaaggatgagctttgccagctccacgtggaagtccctaaagctcctccttccacttcgaagcgtgactgatgcctccagggcctcacagccgcttctgaagcacttcctgaaagccagctccaccctggcgaggccctgacctcagcggacccaagcccaggacgatgcctgttgcgttcttctcccccagtagcaagtcaccttccccagcagcctccatgttgtctgggctctccctgtgggggatgccaggggagagtgagagagcagaggtggccaagatggcatgtgctgccttctctcctggaacatgctgcttccacagggcagtgccagtgtctccgtgtgaattcattgattgtggcctgagtgaattcctgggtttgctgttccagatgattctgcagggcttcaaaaccagcaaggccctgagcaaagctgctccttcttctcatgggctgaactcatcgtgatgtcactggctaaggggggcagcatggggtccagcccggcccaggcacatggagctgcggtcctgtcaggctgagtgtggtgtttgccttctaggatggccccgaggccaccagttccagagagggtctgtcaccgaaagacatccatgctgagtcacccaaagacatccatgctgaatccatccctctgccattctgccttgccccaccctctgccattctgccttgcctggccctctgccattctgcattacgcctgatttttggaagtgtggttttgagtgttggcagcccagtgtcacagaggaccatatcttagaaatgaccccaggcgagagctgtggctttcctgttctatttgaaggcagctgttttagggtgcagcgggtccagggacacagagtgggccatgagcaagggatgggtgctggggcctggcagagctggcaggctctgtgaccccggcacttaggaaggggtgggcaccgtgaccctggcactaaataaggaagggatgggtgctgtgaccctggcacttagtgaggaaggggtgggcactgtgaccccggcacttagtgaggaaggggtgggcactgtgaccccggcacttagtgaggaaggggtgggcactgtgaccctggcacttagtgaggaaggggtgggcactgtgaccccggcacttagtaaggaaggggtgggcactgtgaccctggcacttagtaaggaaggggtgggtgctggggccctggcacttaggaaaggatgggtgctggggcccggcagagccggcaggcactgtgaccccagcacttaggaaggggtgggtgctgtgaccccggcacttaggaaggggtgggcactgtgaccctggcactaaataaggaagggatgggtgctgtgaccctggcacttagtgaggaaggggtgggcactgtgaccccggcacttagtgaggaaggggtgggcactgtgaccccggcacttagtgaggaaggggggtgggcgctgtgaccccggcacttaggaaggggtgggcgctgtgaccctggctcttagtgagcaaggggtgggcgctgtgaccccagcacttaggaaggggtgggcactgtgaccccggcacttagtgacaatgttggagcctcacctcccagatccataaagcagggatcatgaaaaccaaccgaaggcagcagggcctacggggcactcagatgtcaagaatatgaacacgtggctgctgttcctccccctgttcccggtgcaggtgcagaccctgatagtcgtgatcatcgggatgctcgtgctcctgctggactttcttggcttggtgcacctgggccagctgctcatcttccacatctacctgagccaagaagatgaccacctttgagtatctcattaataaccgcaaagaagagagttcaaaacatcaagcagtgaggaaagatccatacgtgcaaatggacaaaggagttctccagcaaggagctggcgccctgggctcatctgcacagggagtcaaagccaagagctccctgctgattcacaagcacttatgtcacttctgcacttcagtaaaccaggatggggattcgacggcacaggtgcatttgtgagtcccctcagtgtctctgcagcatctatgtgtggatgaatagtgaagccacatgaggcctggtctgaagcagagaagatccgctcagcatcacgttgaatcccaagcccgcgtctccgtgggctccaggacaatcctatgaaagtgacaccgtcgttcattgttcacatcggggaggagaattccatctgaaaatgcgcgtgacttcactgacacccgcgtccgtggcacagccctgtgctgagctccacagacctacagtccatcgcctccccttggagtgggcccacagctgcagacagtgttgtccaaagaagatgctctgagtagatgaatggaacaaactggaaactccagaaacaagcccttctttacatttctaatgtttggcttaaatggaaggtgccaaggaaggggatgaagacccgtgtccatctgcacttggtgctgggcaccacaggcctgcagcttcttaggctctgggaggaggcgcagtggaaattgaggtcgccgtgaggtcgctccaatgttgccgtacactgttgctgcctggctaccttcccatctctgtcatcatggagagtgtgggcaggggacccctggccctcttccttcttctcctgccccggggggagcagcagagagccaaggggctggaggaggagccaaggccaggaactcccggctgatttgcaggcgcctgtgtcagttctccactcgtgtacacccagacgggggctcgatggcacaggaagcagatgatgccccgagtatatctacacttgggctgcaacaagaaacaacagagcccatgaaaactgacagtgctgaaagtgaagactgagattcaggagctgaggtgcccctgtgatccaggtcttccaccctgaaaccccatcctccatcaaggtcctgcctgtagagtctaccttgcaaagcctcctgctcctacccatgctacaggccaggaaccagagcccatcatctcagaggcccctggatgtccttcgaaggaaccaggaccctcagagcccagcatccatctctgtcatcatcttcatcacacccaaagaagagccagccttgcaggagggtttacatctccaggaagatgggctgccagcaactgcagaggatgcagccacctgcttaactgtgctgtccagccagccagccagctgcagggcctcttgctgcttaagagctgatgggccgggcatgttggctcacacctgtgagcacagtactgggaaatgggagcacagtactaggaaatgggagcacagtactgcgaaatgggagcacagtactgggaaatgggggctcacagcactgcaaaatgggagcacagtattgggaaatgggagcacagtactgggaagtgggagcacagtactgagaagtgggagcacagtactgagaaatgggagtacactactgagaaatgggagcacagtactgggaaatgggcatacagtactgagaaatgggagcacacagtactgggaaatgggagcccacagtactgggaaaggggagttcacagtactgggaaataggagcacagtactcggaaatgggagcatagtactgggaaaccccagacctggattctgagtttttcagcctagcccagacttcttatcttagtagacaaaaagagtcaataccagagaaccagaggcatcctctgtattttaatgaactctgcattttaatctgtttagtagtcattttttaaaagataatcagttttccaaatatatctataagttactacgtgc

SEQ ID NO: 18639 - protein, 220 aa, Homo sapiens
MLQARNQSPSSQRPLDVLRRNQDPQSPASISVIIFITPKEEPALQEGLHLQEDGLPATAEDAATCLTVLSSQPASCRASCCLRADGPGMLAHTCEHSTGKWEHSTRKWEHSTAKWEHSTGKWGLTALQNGSTVLGNGSTVLGSGSTVLRSGSTVLRNGSTLLRNGSTVLGNGHTVLRNGSTQYWEMGAHSTGKGEFTVLGNRSTVLGNGSIVLGNPRPGF

SEQ ID NO: 18640 - DNA, 2358 bp, Homo sapiens
ttgttcataggggtccctcgttttctgagacacctcatctgagcactgacgaggggacacaactcttggctgggaagcaggagactgagcattgccttcaagccatccccacacatgtgacctcagtcagcattctgccctttcatgggtgtcagttgtctcgtccataaaatgggatgatgttcttgttccagccggcatactggatgactaaatgagggaacaggtaagaagctgcattggaaaaaggtaccattcagctgcaagacatccttgtgcagttcccccagggctaatggggtttggttgcccacctttgctgtgtctcttcgtggcgccagcaggtggcagcattgcctttgcatgtgccggctccacctctggcctctcccagacatgcagcgtgtagggcaggggaccattcttcacccaattcatttcaggggtcatgggaaggagggatctgaaatgccctgaatgggaagggcctggaaagaaaatgaaaatctcattcctcccctcaaagaaacacagataagccaggagagcaggatctggtgcatgagcccaagagggctaatgtgaccacttaggctgaagggggaccttacctctctctgccacaacggtgtcccccaccacctggaggagggaactggggatccagaaggcttgggtccctgtctttggttggaaaagtcagccagcattgcagtggggcagcaggaattcctctatttttgtgtgtgcaacagagttgaaaacttaattcactctataatttatttgtgcaaaaaaaaggtaatttccttatttatgagtctataatgaatctggcctttcttccaacccctgcctgatgataagcgagaaaaacaatgaaattttcaacttgatttgaacatcctggggccagagagtttagccggtcttgttaagtgatcttattaatttctcttggataaaatgcttagttctcagactgctttgcccagcttctcccactgtggtgctgttggggttttgtagacagtcaagggcagcttgtgtggcatctggtaggaggcatgagttgggatcctggggtgtggtgtcctctagacccagcaaggtcccctgtccctcctggccactgatcatactagaagctgagtttatgaaactcatggtccagtccctcctgatctgactagagcccatgtggcgcccctggctggccagccctcctgcacctgggcccctcctccccaccaagtctcctagctgtgccaccatggccccagtagggctgctggctcacaggaatggaagttggctttgaaagctgaactttagtggtgcctctcccttaccggggagccctggtgctggaggcagaggccgagttggtttgcagctgcctgggatgccacttcttcccagagttccaatgtgagttggggacaagggcttctttctctcagggaggggtgagtgggccagtgcttggctctgcttgttatccttctaatccccttcgtaccatcccctgggcaggaaggaggggaccaacactcttcctcttcttgctcagtcatccattacataaaattccagggccacacccaaggagagggatgagggaatccaggaaacatgctctcaaaagaatagcctgctttagaagacttttgatctgcagcataatcctgttttgcatgtcaaataccaaacattaccacattttttcttctgtgcattctgtctatatcaaacattaatcctggtctctctttaagcagagatgcatgcctcaggccaatgaagatgaagatcatgtaccatcaaggcaaaagagaaaagcactgcactccaacccgggcaacagaattattattattattttttaagagataggatatcattctattgctcaggctggagtacagtcgtgcgatcatagctcactgtaatcttgaacacgtggactcaagtgctcctcctacctcagcctctaggtagctgggactaggggtgtgtgccaccacacctggctaatttttctattttttttcaatagatggggtcttgctgtgctgcccaggctggtcttgaactcctgagctcaagcaatccccttgcctcagcttcccaaagtatggggattacgggcgtgagccattgtgcctggcccaaaatttttcaaatatcatccttttaagcttcaaatgttaccaacattggcgaatgcaaccagaggagacataacacataaaacatggggggtttatccacaaggagaattcactatcttgctggtgttaggatctgtccttccagggaggatacgccatgagtcagaagtagatgccactcagc

SEQ ID NO: 18641 - DNA, 2882 bp, Homo sapiens
aaagttagtctaactattagactgtcagactctgaagtgtttcttattttggaaaggtgaagacttgctttagtttgttcatagtttccttggcagctgctgatggttttgatggagattcagatggatttggaactaatgctaacttctgcttggtgaagatgctaaccaagttagatactcttcagtgaattctggtactgtgtacgattaatcctcatccacagtattacgctgtgcaaggctatatatacacaggattaatctttccatgatttccactgccctgaaggaaattagaatgtagtctggctccaagaaaacactagaaactacttcagctggtgatggaaaatagtggaattctatacatcctttgagacaatggaagcagcaaaccagcgttctttggattggggaatatttttggtactaactgaaaaacatcattttaagcctggccctgcttagaggagacttgttttctcttccctctctccctctcttccttttttccctccttcctctttttctttcctcctttccttcttgtctccctcccttctccttccttccttcttcctctttttctttcctccttccctccctccctcccttccttccttttttcctttctcccctccttccttcctttttttcttccttccttcctccctccctcccttcttttcttcctttcttcctttgccctaaaacttgggggaccctgcctgctcattttgtttagaatagaagattactacttttctctgaattgtcatttatttttagagaggtaagaaaaaagggaatagctgccttccatatatacttatgacatggagattatctactcatttaactttgcactgctattggctgtttatttggcttttgaaaaatcaggtgctatttattcattgggcttgtggggaactctagtagccctgaatggcatttgtggcatactcaatgaagtctaattctttatcctggcattaaaggcttaccaagatctggcctcaatcttgcaaatgagcactctcttatatacctgaaggaaaagtgctaatttagccaactaatagagataggtataaataccaatatagacatagatatgaaactttagttgcaaagaaatgtttaatatgcttcaaagtgcatatttccctcttccatgctttattgtctattcttatcagcagaaatgttttcctatttttccttacctgtgatgtacctatccatcctttacagttgagttcagatgctacttctgtcatgaacccattatttatcctccctgtgagaattcatttttccctgtttttggatcttacagcctttgatttgagcccccatttcagtctgctttatactactgtcttgcatgttttcccatgataaataagatggtttttgggaaactgaactttggacttacttgattctcttataacaccaggaaattggccaattctagttgagttatggaaatatgttgtctgctgcataccaggcaagttcaagaataccagcaactcctgctacttagggtaatggtacaagtaggattaagtggatatagttgctatctatctgtagaagacaatgagtgagtgctgtcttaagtttggaaagtagttgattctctgcagaggggtataaactactgatgaaaggagagtgactcattactcctagagattctgaatgggaagaatgccagctttatgttttctgatactgattttttttttaataacttggtgcaaaagtagaacattattctaagatgactgttgtggaagaaaaaaaaggtagaacattagagttgtaaaaatgtttttaactataaagaggaaaaaactgaacttatttataattcatttacctagagagaacattcaacattttggtcaatgtattttttttctttatatctatgtagatatatatttcttcatttatttaacaaattgctactgacaccctatggtttgctggaagtgagctgtgtaggaataaccatgagcctctgctctgatgtaatttttagtgtatgttgtatttgttgacatataattttatattttgcttttttcacttaatgtatcatggaattttttcatatcattaaatattctctttgtgtggcacaatagtatttcagcatgtagatattttgtaatttattgaatgaatcctttttgttgcatattttcaattttgtctgtaattatatagcaatgcagggaatagtcccgtgtagcaggtggaattctaagatgaactccagtgacacttaccttgtataattccctctccctgtgaacatgatgggatattacttccatgattatgttatgttacttgcaagggaattttggagatgtaattaaggttgctaatcaattgactctgaattaatcaaaagggcaatattctaggtagacctaacctaatcaagtgagcactttaagaacagagagttttctcctgcttgtggcagtagaggaagtctgagagattcaaagtgtgaaagagactctacaggaggaatgttctccattgctgaaatgacaatttcccacagacaaggacctgagggaagcctctagaagctgagagtagtccctgccaacagccaaccaaaaaaactagggaccatagtcctacaacagcaaggaactgaattctgcaaacaatctgattgcgcctggaagcaaattcttccccagagcctccagataagagcccagcttctgaccaacatcttgatttctaccttgtgagaccctaaacagaggacccagttgagcccacctggacttaagatctacagaactgtgagataataaatgggtgttgttttaagg

SEQ ID NO: 18642 - DNA, 2805 bp, Homo sapiens
agatcaagcattacaagcatcctacaagcctgcttatgtctcctcccaatcatcacttccttccttctcctaagagataacctctatactgacttctaacagattaatattacctatcttttacatttatataaatggaatcacatagtacatatttcatgtatgcattcttgtactaaacattctttgtgagattcatttatgttgtggcacataacagtaattttctgatttccagtactgtatagtatgctattgaatggatatacctgattttatttatctgttttcagctgttatgaataatggtgctagaagcattcttctttacttctcttggggcattcatgtaggcatttatctcagagcagaatgaatgcatacttcagcattcttaatttcagttactatattttttgattctagaatttgcatttggttcttttttatagtttccattcataagatggagttctacatcttgttaacacatttctcaaatatgttaatcaaacttattttaaagcatttagctcacaactccaatatttggatctatatgtaggcctagttctattatctgtttatttttcccttggtcttgtctcttggtatgcctgataagttttgagttaatgatggacattgggtatcaaaacttaggaaatattttgaggctctaggtggtgttttcttcctctgaagatataaaaccaaaaaataagagaaataagtgcaaaagactaaaaataggatggaaatgctaccaatattaggtattagtccacggagttcaccatcagagtaaaaggattccagaaagagagactagaagaaacagaaatataagatttcccaaaattcaaggacagatattttcagattgagatagctcatcacatgccagaacaactaatgaaaaagacttagcactgtgaaattttagaacaggaaagataaagagaagatcctttaaacttccacaatttaaaatacaatttatgtacaaaggattgggaataagaatgatatctaacttcttaatagcaatgttagatgatagaagaccttgaaactacctttaaaagtctaaggaaaaattattatcaacctaaagttctatatgcatccaatctatcaatcaaatgatgcagaatgaagatacaaggcctcaaaaatttatttacatcgtttctcagaaaatatctcgaagatattctccacaaaaatgagtgagtgggtgaagaaaaagaagtatataggattcaagaaacagaaaatttcatccaggagaaaagcaaagagagaagctgctccaaaaaagtaaagtcttaatagcaaatacatggaatcaacccaaatgcccatcagtgatagactgaataaagaaaatgtggtacagatacaccagggaataatactatgcagccataaaaggaatgagatcatgtcctttgcagggacgtggatgaagttggaagccatcatcctcagctaactagcacaggaatagaaaaccaaacactgcatgttctcactcataagtgggagctgagcaatgaaaacatatggacacagggaggggaacaacacacactggggcctgttggggagtagggaacaagaggagggagaacttcaggcaaaatagctaatgtatgctgggcttaatacttagatgatgatttgatagatgcaaccaaccaccatggcacatgtttacctatgtaacaaacctgcacatcctgcccatgtaccccagaacttaaaattaaattaaacttaatttaatttaaaacaagaaagttaagtctttaagaaaagaaagcaaaaggatttctagaattaagcacaaaagaattcaaaggatgactcttggacagcacatctataggcagactgtccagagtttagcagaaaatggaaactttcaggagaaaagtttccaggaaaaaaatgtatctgatagagtatgatgtgtttgaacatgaagaataaaattgattgtggtgttgtagtgctaatggaggatttagaaagaattaatgttagaagtgtagaaaacctacaacaaaacaaagcaataatcaacatcaagaaaaacaaaaagttgtacaagagaagaaatatcgtaatatatcatgtagctcagatatgcacaactttttttttaagtagactttatttttttagcagttttaggctcatagtaaaatgaagcggacagtatagagttttcatcatgtcctttgtccccacatgcatgtagccttccccactgtgaacatgcataacagaatggtacatatgttacaatcgatgaacttacactgagacatcattatcatccaaagtctatagtttacattagaattcattcttggtactatacgctctttgggttcttgcaaataggtaaagacctgtgtctagctagtactatagtatcacacagaataggttcactgccctaaaggtcttctgtgctccagctatttctttctttcttcccctaacccctggcaaccactcatttttttaaattgtcttcctaattttccttctccagaatgtcatagttaaaagtatatagtatgtagccttttcagattggcttctttcacttagtaatacgcatttaaggtccctccatatctgttaatgccgtcatagctcaattctttttaacaccggataatattccattgtatacatgtaccacagtttattcatccattcacctattgaaagacatcttcattgcttccaggcttttgcaattatgaataaaactgttataaacat

SEQ ID NO: 18643 - DNA, 2759 bp, Homo sapiens
  CDS (1463)..(1855)
agtttcagccgcgacagcaagaacggcagagccggcgaccgcggcggcggcgacggcggaggcaggagcagcctgggcgggtcgcagggtctccgcgggcgcaggaaggcgagcagagcacaaatgaggatgtcccaatttctgccttttgggttttaccagctgctgtaggttttccacactgagtagttgcagtagactggctgccctctgtccaacatgcaatgccacttggtatcattcatggtttgatcccgagaacaatccacctattatataattttcccctcacatgtcattccactgacctcaatcaactgatgtggtgatgaaatgaaacacgttcatggagaagctgagaaaagtgtgcaaagtacacctacaaggagagtttccccatgttttccataatgtggccatccaggatgaggaaggaacaagaatacttgaacatcacagagaccaaaccatttccatacgtcaaaaccagagagcctgggatcaaagttatacttggaaaagggctgtaagaaatgaaaaaccacctagcagcatctgtacttcccttaaaatccaacctccactggcttcctctgaatccatcagggtcttaaatatttaaagaaaggctaaattcagaaggtatttaagaaatgggcaggccctgctgggtcctgatgagtccagtgcctccgggagctgcccaatgggccagcagtctctgtggaatccaggtgacccttcccactagggattggaccaacacttcacgcagctttcttccgaggaccccaacgaaggagtgatttgaacccaagtcaaaagggtgccctacaaggctagtttgaacagaacccctaccctgatgtgactcccagagaacaactgaccagagaaattggcactccagaatttagaatacagatgtggtttcgaaaccagagaacacaacacctcagacagagtctactggggtctggattggggtcgatttcctggaattgctatcagggaagaactggctgcacaaacaggcctctcagagtccagaactcagatatggtttcataaccaaagagctcggcactgtggccagagttgtagacttgtgaattccctggcagaaggccccaagtcggagacctcacatgactgtgtgacaaggcaaggcaacttgtgcatggcccctagcagtggggtcacttccctccctccagttctttcagcaacaaccagctcttcttccacctcacacatgctttggttcttgggttccccctgggctcggagtgagccaggcaccaagggtcatgatgctccacccaccaggctgtgctgggaggagagatctctccacctcttctgacacttaggagtcacatgtcaacaggcccagctctaggaggggcgctcttacatcctctggctcctttccagcccccacaccaaggaagatgccaggatgacaaggacagagacacatggcctggcagtactgccctgtaaggactctacacagccccaacctggcaatcctaagcaccagttgcagggaactggtcagcaagacacatctcaccttatgcagtggtggcacaaggggccccaaggagtgatgtcaaatggccagctggagcaggggcacttcagcagcccacagagcctgcacacacctggacatccctgtggcagtagcgggcaccaccagctgcagagccatctcagccactcgagcaaccgcacagctctctgcaaaacccacccttttaggtcaatgcctgtcaattgtatagtttcagaaaaagacacaagcctgcctgaatccaagtccacaggaaaaggtccctctaccacttgaaccacctctcagtgaggaagaatttgatgctctgcctgatgtgatgcagacctcaccagggtgtcagctttgggaggagcaaggcctccttctcacctccaccatctaggccactttcctggacacagaatcaatgtgataccaagaaggacaaacaatgcacacactgtgtttggcagcaagaccaatgcgagaaaaagcaccaaacacttagaaacccaaagggagcattttgactcagtcttgtgggaggcgcttgacttctcctctcacttaatggcctatatgattgttgcaaagctctctactgcccctgtaaggcatcatgggcaccaagccatgaatgccttcactgcatcctgaagaaccaaagcatttttatagcaaacatcacctactccctgcaatcctcaccgcttgggcagtctggactatacaggaactggaaccaaaccaaaccagggcgaggacactaggtctaagggggacagctccacacttctttccttctggcaagttcagaagtcacacctgaaagcaggtagatgtctagaatatagagggatgctgtattttcttgttctgtgagttgataacaaggagtttttaatctcagctctgagagttgcaaatgggaattggaagtcacttcactacccacctcttgggaactgattccacaagtttatatccataatcccgagtaggcttcatgaccagttttccctctgaacattgaaatgtagagaaaatgacagaagttagaatagcaactcccttagatcattgaacaaagcatatgaatgttactcttctcacattgttagcatttctgtatgttaacctgtacttctacccatcaagctgccctttttattataaataaatgtcaagtttaaat

SEQ ID NO: 18644 - protein, 131 aa, Homo sapiens [sequence omitted]

SEQ ID NO: 18645 - DNA, 2705 bp, Homo sapiens
  CDS (3)..(347)
ggatgtttaatggggatgtggagattcattgtactgtttctatatttttgtggatgttgaaaaatattttcttcttttttttttttgagatggagtctccctctattgcccaggctggagtgcagttgtgcaatctctgttcactgcaacctccgcctcccgggttcaagtggttctcctgcctcagcctcccaagtagctgggactacaggcatgtgccaccatgcctggctaacttttgcatctttagtagagatggggttttaccatgttggccaggctggtatcgaactcctgaccttgtgacccgcccaccttggcttcccaaagtactggaattacaggcataagccaccacacccggccgaaaaatatatttaaaaaagtaagaaacacacaagacaagcagcttggacttatcttctccatgatacctacccagtatccctgtgagcagctgacattcctttctccaagcagttgctgtattttgaacattgctcgagcaggaaactttttataatgggtttatttatccatgtcacctgctatactatgtttattgtagctcagcatgatttccaggtaccaagcacagtacttggtgtgtaatagtgctaactgaatgttggatggatggagggattaaaaaaaagaaaaacacctgaatatcagacacttaataaatgtttcttgggaggccgagatgggcggatcacgaggtcagaagttcgagaccagcctggccaacatggtaaaatgccgtctctactaaaaatacaaaaattagctaggtgtggtggcaggcacctgtaatccccactgctcaggaggctgaggcaggggaatcacttgagcccgggaggcagaggttgcagtgagccgagatcacgccattgcactccagcctgggtgacagagcaagactctgtctcaaaaaaaataaaaaataaaataaataaatgttttctgaactgtattctctatctgttcttagttaatttgtgtttgccatttttaaagtcaaaaaccagggagagttctctacacaatgtaaatatttgataagtacttattaattgcttattgtgctagtctattctttaaatatcagaggttccaaaacaaagagctccaatagtaggatcacagtcaggtaaccaattatccgagtaggaaggttgccttagttgaagtaactggaggtgaatggggatttgtcaggcaggctcttccagataaaggtgaaccttccctgttgttttgatagaaggaggaaatggaatgaccatcaagagaaaggtagttgctggcttgagaggatcatctgtgcaacaggcagctaagcagaagaagactttatatatatttttaataccacccacactgttgctagtattccccaccactccattggcctggtgaactcttattcatccttcaaaacccagcttaaccatggccttcaggaaatcttgagctggcttcccaggacagagtgggtcagtcctctgcatgctcctgctgctgtgctgtactcaccatactgtactgtaatttactggtttgtaagtcatttccactgctgggttgtgagctcctccaaggcaggggctttgccttatctgcctatgttcccaggacttacacagtgcctgatgtgtagtaggtaccccatgaatgttttacataattagcaggagcgtatcaggtaaattagcaaagcaaactgtgggatgtgggatgtcagacaataggagtaggtgggcttatgggagctgaagagcacatgctcctcagctctgattgattgctctgtgcgataggggcccagtggtggtggatctaacaactttttaagagattctgacaattcagactttacatgttgaatattccggattttcaacattagcaactaattccatttggaggaaaaaatgtagcatgggtctacagacaagatctggctgtaattcatgttcagaggtaatcaggaaacgattagtttactgaaaatgtagtcgacaatcaaatggctgctaggttgccaataaaatgtgttgagtggaattcacgtgccccagaaagctcctcctggtgctgtgggcaaggaagagggcccaagtgtgggaagaaggattcaggaggcagagccaactctcccagtgctgccggagccactcttgcttgagctgaagtactgtggactgttttgcagccttcttgatattgctcaaactgagccacccttgatattgtgcctatcagaatgatggattaaatgttattgtttccttatattccataggcatcagatatcaactgtcattgtgaaacatattacaatgtaagagatttgatattgtcctaacagctttagtctctggtggctttactgagctcttctggtttagaggtgaaacaacccagagaaaggatttatttatgtattcgtttttggtctgaagaccaaaaaggatgtttgcaagatattaacagtaatcattcattcaacaactgtttttaaagcacctgctgtacgatacctgctacagatacagtgatggtgaaagtatagttgtctcagtgttattatagaagcttttactctgtattttcctcgatttctattttctgtactgatcatgcataattttttacaatcattaaaaaaacaagaaagcaaaaaaaaacaaaaaaac

SEQ ID NO: 18646 - protein, 115 aa, Homo sapiens
MFNGDVEIHCTVSIFLWMLKNIFFFFFFEMESPSIAQAGVQLCNLCSLQPPPPGFKWFSCLSLPSSWDYRHVPPCLANFCIFSRDGVLPCWPGWYRTPDLVTRPPWLPKVLELQA

SEQ ID NO: 18647 - DNA, 2811 bp, Homo sapiens
cgccttgcagtttgatctcagactgctgtgctagcaatcagcgagactccgtgggcgtaggaccctccgagccagtgagatgaacccggtacctcagatggaaatgcagaaatcacccgtcttctgcgtcgctcacgctgggagctgtagaccggagctgttcctgttcggccatcttggctcctccctcaggtatccttcagaaagcctgggcaataaaccgaaggcttctaaaaagagcaaagtgtctggtgagtcaagcagaatctcaaagctgaactaaatttggtgaatctggactttgccagccctgaagaagaataagcatgaaggaactcttcaagtagctagtgcatttgtgttgctgtcagcaaaatagccagttggagagctatgctgttctccactaaaagaattgtagaaccattgggctttaatagatttgaaagactgtataattgaatttataatcatctggcttagaaaatatgcaaaatcacattcatagtgagcagatgagttatggtatccgtggacaattctgataggaaatattggttatatctggtgaaacccatgataaaccaaaggcacgttaagggcagatggttggagttggggtatgagtgttggtcatacggtggaggggaaaagagtaggatgttaggatcatgcagaaattatgtggttgccctacagaaatgataagccataaagttctactctggccagtgttttaagtcgatgctagaaaagaaaaacaatagtggcacaggggttggttatttgttttccacaggccaagaatatgtcaaaataaagcccaataggatgtatattcagtggtcaagtagactgagagatgttaacacacttattcatggcatcatttcagattttgcctatagtaggcattcaaaagatgtttgttaaattttataaataaacaaaagctatatcagcatggcctttttctaatccaaaacctgggcacacagccaggataaacttaagctgtccaaaagccatgtgcgctctcgccagaatcatcaattctctccagtcatttcactatgaagaaggcctggatgaacttaatgggaaagccccattagctgccactcttggattgcatatctacgtatccttcagatttcatgtccctgatatatttgtgttcttgctagtcctgattttaaattattgcttttccttttaatattgttctgatttatttttatatgttactcaatattctttaatgacagcaaataatgataaaaataatagctgccatggcctattgaggcttcctatgacagaaactcttctaagataaaatttcatcctcatgacaactcataacctttgagaaagtttccatagatttctattttactactaaaaatactgtggtttagtgagattatgcaattaactcaaattcacaaagataggaaatgcttcagctgggatgcaaacctctatctaagagaaaaacccgatttcctcattgctatatataccattaatttggagcaaagcagaatcacttaaaaatccttttaagtgatgattaaataaatcatcaattgttaaacaatgattagattcctaattattttcagtcatttgtttaccactaaatataacaatagtagtaataataataatgataacccatctgcctgtgttcttaagtgtcttatatattagttgtggaaataagacatatatgatgaactgttaaaaactatagaagagaatttatacctaaatatgttcatgtattaagtagtacaagaaagtcatctggaaattttaaaatgaaaggaaatctgcaaatattaagtcaactgggcatttcttttcaggaaatgaaaattaagctgaatctgaagggtgctaagaacaaaattgatggaggtgaagacagagacttctacataaaggaaatagttaggaattaagcacagagacaaaaataaaagacagtgttttgtaggggcagagtgattgggcatagccaagaaacaggatatattaagtagattgataataaggtttcaatgcttcaaaagttctaagcttagatgcttggaaacaaaatttgaccaagaatttgggtaataaatttgaagaataaaatgagaagcttaatttgcatgtgttcagtttaaaatgatatccggttggaaataccaaattgtagagctggagacattgtactgggaattgagtaatggtcaggatttattacactgggacagaagagaccaacacatagaatacactgaaggtcaggttctgtccagaaaccactcaacaccagagcattaatgaatatgtgaataagtaagtgcatcttcttagctcaggcatggaaactgatttaaaatgtaagaagtctgtatggatgggagaaagaagtggaaatcaatttaagggaaaaaaaagcaaaatcagaatatacaatctctcttctgaggccctagtcatatgttgctaactatagaggagtcattagataaaagtgtgtacatttggaagcaaacaaagactgcatcccatgagatttcataagctatgattattataaagagcaatagactctcaaaaatactcttaaaatactatacataaaaatagctagtatttaaaggctcataaaattcttgaacaggtattagccatttaagaagtgatggtagaaagagaaatgtataggtcagagaacagtccttggaaaatgaaaggagttaggaagtaaaagaaagaaaatcaagggaaataaatgaaagaatgacagag

SEQ ID NO: 18648 - DNA, 2615 bp, Homo sapiens
  CDS (181)..(1638)
attcccagagaggaactggatgaacgaattgctcgggaagagttcagaagaccccgggagtccttactgaatatttgcactgagttctataagcactgtgggccacggctgaagatcttgcaaaatctggctggggagcctcgggtcattgccttggaactgctggatgtgaagtctcacatgaggttggcagaaattgcacactcccttctgaagctggcaccatatgacactcagacaatggagagtcgtgggcttcggcgctacatcatggagatgctacccattactgactggacagctgaggcagtgaggccggccctcatcctcattttaaaaagattggatagaatgttcaacaaaattcataagatgcctactttgaggcgacaggttgagtgggagcctgccagcaatttgattgaaggggtttgtttgacacttcagaggcagccaatcatatccttcctgcctcaccttaggtcactgatcaatgtctgtgtcaatctggtgatgggagtggtaggaccttccagtgttgctgatggattaccccttcttcatctcagcccttatctctcaccacctctgcccttcagcacagctgttgtccggcttgtagcattgcagatacaggctttaaaagaagattttcctttaagccatgtgatctccccattcaccaatcaagagcgaagggaggggatgcttttaaatctgctcatcccatttgtgctcacagtaggatctggaagcaaagatagcccatggctggagcagcctgaggtgcagctgctgctgcagacagtcatcaatgtactcctcccaccgcggatcatcagcacatccaggagcaagaacttcatgttagagagctccccagcccactgctccacccctggggatgcggggaaagacttgcgcagggaagggctggctgagtccaccagccaagcagcatacttggcgctgaaggtgattctcgtctgctttgagaggcagctcggaagccagtggtactggctgagcctccaggtgaaggagatggctctgcggaaggtgggaggcctggccctttgggatttcctcgacttcatcgtgcggacccgaatacccatctttgtgcttttgcgccctttcatccagtgcaagctgctggcccaaccagcagagaatcatgaagagctttccgcccggcaacatattgccgaccagctggagcggcgcttcataccacgccctttgtgtaagagctcgctcattgctgagttcaacagtgaactaaaaattctaaaggaggcagttcatagtggatcagcctaccaaggcaagacatccatcagtaccgtgggcacctccacctctgcttaccgcctgagcttggccaccatgtcccgctctaacacgggcacgggcactgtctgggagcaggacagtgagccatcccagcaggcttcgcaggacaccctgagtcggactgatgaggaagatgaggaaaatgactctataagcatgcccagcgtggtaagtgaacaagaagcttacctcctgagtgccattggaaggaggcgattctccagccatgtctccagcatgtctgtacctcaggctgaggtgggcatgctacccagccagaggtaaacagctatggttatactgtactctgcatttgggggcaaagttagaaattctgaaaatacactcctgttattctacaaagacagaaagagaagcaagcaatggtaatgtttttagatagatcattccacaaaggatttgtcaactaggttcctgcaggcaacactttgcagttttctaagccaagctagtagaagggatcccaatttccaagtattgtctctccttaaaaattttccatagacacatggtcttctttctgttgtcaaatggcattcttgtatttcagatttatcattagctaagctaatgatgggtacttggcaagagttaggaccatctttatgtttttggtaaagtttaggcttctgatatattattagtattcagttgtaggtagtgacacttaaccaagcagaaaaggatctatgccactgagtgtgaccttgggcaggtcatttaaccgtaatccacagttctccctctgtaaaatgaagaggtttgctaaaatgatctttaagataacttctcatctatagttctatgattccatgacaaaacccctttaaatattttgtgtgttctctgtctcttaagaatataagtaaaaaaaaacttcccatgtatatatatatatatacacacacacacacacacaatgaaagtataatgaaaatgatctcacatgagtcaaaacatttatcttaagtagatgaatgttttggaaccaatgatattttcactttaggaattgagtttttcaaggaattgaccttatgtgattttagtgtgttgcttatttttaatacctatagattcattgtagtacaattcagacatggaaaataataaaattcagggcatattctgatgttcacataaaaccagtttatatgtaggaataattaccctgtacccaaatcctttcgcaaatggttcgtgaactacacagatgaaataaaatttgtgaaataaag

SEQ ID NO: 18649 - protein, 486 aa, Homo sapiens
MRLAEIAHSLLKLAPYDTQTMESRGLRRYIMEMLPITDWTAEAVRPALILILKRLDRMFNKIHKMPTLRRQVEWEPASNLIEGVCLTLQRQPIISFLPHLRSLINVCVNLVMGVVGPSSVADGLPLLHLSPYLSPPLPFSTAVVRLVALQIQALKEDFPLSHVISPFTNQERREGMLLNLLIPFVLTVGSGSKDSPWLEQPEVQLLLQTVINVLLPPRIISTSRSKNFMLESSPAHCSTPGDAGKDLRREGLAESTSQAAYLALKVILVCFERQLGSQWYWLSLQVKEMALRKVGGLALWDFLDFIVRTRIPIFVLLRPFIQCKLLAQPAENHEELSARQHIADQLERRFIPRPLCKSSLIAEFNSELKILKEAVHSGSAYQGKTSISTVGTSTSAYRLSLATMSRSNTGTGTVWEQDSEPSQQASQDTLSRTDEEDEENDSISMPSVVSEQEAYLLSAIGRRRFSSHVSSMSVPQAEVGMLPSQR

SEQ ID NO: 18650 - DNA, 4411 bp, Homo sapiens
  CDS (2333)..(2635)
ggcttcaggtttaaaggcgcgagcgccacccacgcaggcacaagggctcctagtcgttttatttttagcgtaaggtcttcctctttaacaaggaagtaaaaaaaaaagttgtgcaataaatattaatcgtccttatatgtactcgggaacgttcgtcctttaggttttttcctggcgcatgggcgccgccaatcatttcggggcttattttggttctaaagcccggggcagccaggcctccctgcctggcctcggcggggacgcgggacctggggccccggaccgggcctaaccgccctggccggtccccactgatggtggcggtcggtcctgatcgtcctgatggcagcgaccaggctggactcgggctgtgcaggggcgaggggagcagggcggggtgacgcccggagagcggcctggagagcgcgtgcttcagaaggcgtgggcaccctgtcccctttgcagatggggatgcaggccctggtggcggtggaggggagatgggggcagggacgttgccgggcagaggaagctgggtgagtgtgcacttggtcccctttgctcctccctgggactttgggctctatagggcagcctccgaggcccacgtgcacactcggtgaaccacagtccagacacaggcagggcggcaggccagggaaggagaggccaggtgttggtgcatggagaggccaggtgttggcctgggggtgctaagtgaacccccaaggtcgcggagacagtagggcaacagcaaaacgagctctgccgtccagggcgagggcccggagtcctccccaggggtgggctgcagagaagcccctgtccaggccctgctcacctgcaaagtgctcccgagctcctgtgcccccagcagcaatcccagccccgctgacacccaagcttgtcacccgctgggtttcttgaggtctgaggaccgtggctgagggtgcatgggcgctgggatggagggggatgtcctgtcccagtctgtgcttattaattgttaaagagggcaaggctgcttttattcaaggtgggggggctgctaaagcgagatgttgggttaggggaggcagatccggctcaactccagatagaaaaagtgggaattgacagcccaggcgtagggtcgggagtggagagaaaattactaagaggaagggtcaggggcaaggcgggttctagctgcatagacaggatttttgctgaaaaggcaggcagtgtggtcacagaccgagggtgggagttgaggactttgatcagggaccaagagtagacgattttcactaaaccgactcagcaggattcttgctaaatcggccgaaaccggccaaggtcagggactggtcacagggagggctcagaggagcctgactcgagtgtggtcaaaggagagagtctttgtcatcttttaagaggcgagagtgacgtattagtgagaaacggtgaagggatcaagctcaggccagcagccccgagtttgagatgaggacaggctgggtccaggaagggctgcaggaatagggggcacctgagcctgcagaaagcggggagcccagccgccagagcaggcacccccaggcagacctcagtgtgtcctgccctgtgggagtggcaaggccagaccaagctggatgtgaaccagtcccagaacaccgcctagaatttggattgtaatttgttatcgatgatattgctgcttggtctctctcctcttcctccccacccccacccaagatggagtctggctttgtcccccaggctggagtgcgatggcaggatctcggctcactgcaacctccgcctcctgggttcaaacaattctcctgcctcagcctcccaaatagcggggattactggtgcgtgccaccacacccagctaatttttgtatttttggtagagacggggtttcatcatgttggccaggctagtctcaaactcctgacgtcgtgatccgcccacctcagcctcccgaaatgctttgggattacgggtgtgagccgccgcgccgagcatggccatcgtggctacatcagtcccggctaatagagattttagcacactcagattctattggctaataagatttaattataattctggggtatttaacaatgtcgttatacagtcttcattgttgcaaatggagaatgaaatcgggtgcatgtgacactaatatgacctgttcatgcgctgtcacttaaacggagttaagtaacatagccctgagcaggaagactccttccccacttctgtccaggagctccttactcgattctggggaacagaaaggctttcagcggccaaggggagtgacaacagccagacatgagacacctcctagagccctttggtgttaccctttccggtccatcagccacagtgtccaccccaggtagctgggtcctgagttcaccgtctcaggacatttttcgacctggtttgtctgaattattattattattgatcattgagacagggtctcagtccatcgccaagactggagtgcagtggtgtgatcctggcttactcagcctcccaggctcaggtgatcctcccagctcagcctcctgcgtagctgggaccacaggcaggcaccaccatgcctggctaaattttttgtattttttgtagagaccagctctcgctatgttgtccaggttggtctcaaactgctgcctcagcctcccaaggtgctgggattacaggcatgagggaccaagctcagcaatctgaattacttatgcagaatttttttttctctagctggaagagctgtttatatgcacgtttctttgggggcaactcttctccattgtcacagattttttttttccaagccattcctgggggattcctgggagccatgtgggagaggcgtgaggaagtgagaccttcaccccgagacaggtcctgacacaccctctggtgcctctactcaagtgagaagtttggctgctgtaactgactgggaagcttaaaataacagacaatcatctctcacatttatggggactgggaagtccaagaccaagttgccatctggggagggcctgttcctcacagcgccttccagctcaggcctcgtttataagggcactcaagccttccacgacaatgggtcctcatgacttactcacctcggaaagccccacccccaagaccatcacattgtgggtgatggcagagcataaggtgccttccccacatgctcgggttggcccagcgtctcacgctagcagctacgtggaatagttattttttctggagaactctgggacccctctgatgtcttggagcacccacacaggccgttcactgtgcacgctgtgaggctgtcgtcttggagcacccacacaggccattcactgtgcacgtggtgaggctgtcctctggggagttctgctgttgtatgggttctgtctgtgtcaatgtcccagcgggaacgcagggcacactagcgtcatccccagagggcttggtaaggggactgtttgcagagacataggcagagggctggaaaactaccaaaaaagtgcagtgttctggacctaataatagcagagctattctcaccctggtctgaaggcaggaggggaggagcagttaatggattctggaagtcaggttgcacagagtcaccttgaaagatgccatgaccttcaccgagggccagacagagactaagatgaccccataggagaataagacctagacctcatcctcctgcctcctgccagtccctgccaggggtcgccaatggcaaaacaggactggaagccagaggccatggaagcccatggatgaagtccacaggccagcctccccgagagcagcctggacggtccgcaggagacgtctcctgtcttaggcgtcccacgccgcgtgctcctgttcagccctgccgaggtggaagcttggagtggctcacggtggatgcattgacgctgcagacgccagcaagtgctacaaaccagagctggcctttaactcagactgatggagaaggtgttaataatgcagattagacttaaaagtgttgaagccattgcactgtgaacagcaaaaaaattgaagaactcttctggcatttaaaaacaattactcagttcagcagagaagtcactgacaaacgagatcacactgactgctttgtcgttttggttttgtcttactcattaatgcaaataagaacattcactagcatctgtgtcgggcctaccctccctggtcaaatacagctacagtctccctgcagatacgagttttccagaaatgagccgatgttttctgcgagaatcaattggtcatatacaatttacaaaaatgagtactgtatactatatttgtaaactgtacactgcagatgctttatttcactgaaatttataatacacttatccatgt

SEQ ID NO: 18651 - protein, 101 aa, Homo sapiens
MRHLLEPFGVTLSGPSATVSTPGSWVLSSPSQDIFRPGLSELLLLLIIETGSQSIAKTGVQWCDPGLLSLPGSGDPPSSASCVAGTTGRHHHAWLNFLYFL

SEQ ID NO: 18652 - DNA, 1792 bp, Homo sapiens
  CDS (360)..(677)
cacccattctgtcttccagacagttctcttccttctctgtactgcgtactgggtcaccacatcccagagccttgctcagttatagcaactgctgcgggcgtgcacatggcataggcccagtaacttacatacatcggctcacttaggcctcagacagcagcacgaggcaggcacttttacttcttttaccattagaaagccaaggcctagagtggtgggctttgaccacagccacacaattttgaagtggcagagccaggactggagcttagccctgctcaccctagacctatgcgcttgacaagtgcgtgactgtgacaggcccatgggcccggactgcccataggggtcactgtaccatggcaaaggctgaggtgcaccaggaggctgtggcgtcgtcacctgccttatttgctggagaagctgtagcaaagaaccacagactgggcgacttagacaatagaaatgtattttctcacagttctggaggctggatgctggagaccaaggtgtcagtgggctggtttcttctgaggcctctgtccatggcttgcagatgctgctttccctctgtgtctgcacatggtggtccctcgatgtgcgtctgggtcctgatctcctcctcttataaggacacaaatcatgttggcttagggcccaccctcatgaccccactttaatttttttttttttttttgagatgaagtctcactctgccacccaagctggagtgcagtggcacgatctcggttcactgcaaccttggcctcctaggttcaagcaattctcctgccccagcctcctgagtagctgggattacaggtgtgtgccaccacacccggccaatttttgtatctttagtagagatggggttttgccatgttggccagactggtctcgaactcctgacctcaagtgatccactggccttggcctcccaaagtgctgggattacaggcatgagccacctcacttggcccaattttaacttaattatctctgtcaagagcctatctccatatacagtcacatcctgagctactagggggtaggacttcaacatgcacttctgcaggggccgcagttcagccaacatcatctttttttttgagatggagtctcgctttgttgcccaggctggagtgcggtggtgcaatctcggctcaccacaacctccacctcccaggttcaagtgattctcctgcctcagcctcccgagttgctgggactataggtgtgcgccaccatgcccagctaattttgtatttttagtagagacaggctttcgctgtgttggccaggctggtcttgaatgcctgaccttgccgcccgcctcggcctcccaaaatgctgggattacaggcgtgagccaccgcgcctggcctcagccaacatcatctaagggctctcacggagggcctcccagctgcccgccctgtgggcatttgcacatatcctgacaagcctgaaagaagctccgggtgcccattgttcagtccaggtgcccattgttcccgggactgaggcccgggaaagggaagcgacgtggcagggccagcagcagaccctgggcctttctctagactgagcaccattccccgtgggtgtgctctcagcgccgcaccgaccttcacactgcagagatggatgccaactccctggcaggggcaggactgctgccgagcagccccacctgccctcccagccacaccccaagtctgtaagggccgctcccaggaacacctgctactgcacactccaaaccaataaagttttatattttgtttacttc

SEQ ID NO: 18653 - protein, 106 aa, Homo sapiens
MAKAEVHQEAVASSPALFAGEAVAKNHRLGDLDNRNVFSHSSGGWMLETKVSVGWFLLRPLSMACRCCFPSVSAHGGPSMCVWVLISSSYKDTNHVGLGPTLMTPL

SEQ ID NO: 18654 - DNA, 3076 bp, Homo sapiens
  CDS (23)..(2596)
tgattctgaagatgaattgagaatgatgattgcgaaagaggaaaacttacagagaactacacaaccctcaataaatgaatctgaaagtgatccttttgaagttgtaagggatgatttcaaatcaggcgttcacaaactgcattctttaataggtttaggtatcaaaaatcgtgtctcttgccatgatagtgatgatgatattatgagaaatgatcgtgagtatgactcaggagatacagatgaaattattgcgatgaaaaaaaatgttgctaaggtcaaaaacagtacagaattttcacaaatggaaaaatctacgaagaaaacttctttcaaaaatagagaaaactgtgagctttctgatcactgtattaaactacaaaaaagaaaaagcaatgtagagtcagccctcagtcatggattaaagtctcttaatcgtaaatctccctctcactccggtagcagtgaagatgctgattctgcatcagaattagctgactctgaaggaggtgaggagtataatgccatgatggaaaactgccttcgtgtgaatctcactttagctgatttggaacaattggctggcagtgatctgaaggttccaaatgaagatactaagagtgatggaccagaaaccaccacccaatgcaagtttgacagaggctccaagagccccaagactcccactggcctccgcagaggccgacagtgtattcgtcctgcggagattgtggcttccctgttagaaggagaggagaacacctgtggcaaacagaaaccaaaggaaaacaatttaaagccaaaatttcaggctttcaagggagtaggctgtctatatgaaaaggagtcaatgaaaaaatccttgaaagacagtgttgcctctaacaataaagatcagaattccatgaaacatgaggatcccagtatcatatccatggaagatgggtccccatatgttaatggctcattaggtgaagtgactccatgccaacatgcaaagaaggcgaatggcccaaactatattcagcctcaaaaaagacagaccacttttgaaagccaggatcgcaaggcagtgtcccctagcagttctgaaaagagaagtaagaatcctatttctaggccattagaaggtaagaagtccttaagtcttagtgcaaagactcacaacataggctttgacaaagacagctgccatagtaccacaaagacagaagcttcacaggaagagcggtctgattcaagcggcctcacatctctcaagaaatcaccaaaggtctcatccaaggacactcggggaatcaaaactgatttctcactttctattagtaattcgtcagatgtgggtgctaaagataagcatgctgaagacaatgagaagcgtttggcagccttggaagcgaggcaaaaagcaaaagaagtgcagaagaagctggtgcataatgctctggcaaatttggatggtcatccagaggataagccaacgcacatcatcttcggttctgacagtgaatgtgaaacagaggagacatcgactcaggagcagagccatccaggagaggaatgggtgaaagagtctatgggtaaaacatcagggaagctgtttgatagcagtgatgatgacgaatctgattctgaagatgacagtaataggttcaaaattaaacctcagtttgagggcagagctggacagaagctcatggatttacagtcgcactttggcaccgatgacagattccgcatggactctcgatttctagaaactgacagtgaagaggaacaggaagaggtaaatgaaaagaaaactgctgaggaagaagagcttgctgaagaaaaaaagaaagccctgaatgttgtacaaagtgttttgcaaatcaacttaagcaattctacaaacagaggatcagtagctgctaagaaatttaaggacatcatacattatgatccaacgaagcaagaccatgccacttacgaaagaaaaagagatgataaaccaaaagaaagtaaagcaaaacgaaaaaagaaaagggaggaagctgagaaactacctgaggtgtctaaagaaatgtattataatattgctatggatctgaaagaaatattccaaactacaaaatataccagtgaaaaggaagagggcacaccctggaatgaggactgtggtaaagagaaacctgaggaaatccaggaccctgcagctctgaccagtgacgctgagcagcccagcgggttcacgttctctttttttgattcagacactaaagacataaaggaagagacctacagagttgaaacagtgaaacctggaaagattgtctggcaggaagaccctcgtttacaagacagcagttcagaagaggaagatgttactgaagaaacagatcacagaaactccagtcctggagaagcatcattacttgagaaagagaccactagatttttctttttctctaagaatgatgaacgacttcaaggttctgacttattctggagaggagtaggaagtaatatgagcaggaactcttgggaggccagaacaaccaacctgcgtatggattgtcgaaagaaacataaagacgcaaaaaggaaaatgaaaccaaaataataaatgtcagctggttttgatactgaatgtgaacaaggctcacctaaggaaactgacccagaaaacagttttagctgacaaagaagaaatttcagagtgaaggaattttaaaaatctggctgacggaatatcattctggttgccatctttttctgtggaactcctctgcatttcttcctaagtaattacttcaaaaattaaattcaacttcttataaaggaagaacaagatagtccttgaaaatactttttgtatataatctctttgccctctatcctgagtaactaatggacatcttctcatgcaaggtttacatgaagccttttttaataaatgagtcaaagcacttgtattttccagcctaggctttgtgtgaattataggctatttgaaattttatttctgattatgtcaaatacaccttccattttgtcatttttgtttaaactgataaattacaagtcaacattgagtttt

SEQ ID NO: 18655 - protein, 858 aa, Homo sapiens
MMIAKEENLQRTTQPSINESESDPFEVVRDDFKSGVHKLHSLIGLGIKNRVSCHDSDDDIMRNDREYDSGDTDEIIAMKKNVAKVKNSTEFSQMEKSTKKTSFKNRENCELSDHCIKLQKRKSNVESALSHGLKSLNRKSPSHSGSSEDADSASELADSEGGEEYNAMMENCLRVNLTLADLEQLAGSDLKVPNEDTKSDGPETTTQCKFDRGSKSPKTPTGLRRGRQCIRPAEIVASLLEGEENTCGKQKPKENNLKPKFQAFKGVGCLYEKESMKKSLKDSVASNNKDQNSMKHEDPSIISMEDGSPYVNGSLGEVTPCQHAKKANGPNYIQPQKRQTTFESQDRKAVSPSSSEKRSKNPISRPLEGKKSLSLSAKTHNIGFDKDSCHSTTKTEASQEERSDSSGLTSLKKSPKVSSKDTRGIKTDFSLSISNSSDVGAKDKHAEDNEKRLAALEARQKAKEVQKKLVHNALANLDGHPEDKPTHIIFGSDSECETEETSTQEQSHPGEEWVKESMGKTSGKLFDSSDDDESDSEDDSNRFKIKPQFEGRAGQKLMDLQSHFGTDDRFRMDSRFLETDSEEEQEEVNEKKTAEEEELAEEKKKALNVVQSVLQINLSNSTNRGSVAAKKFKDIIHYDPTKQDHATYERKRDDKPKESKAKRKKKREEAEKLPEVSKEMYYNIAMDLKEIFQTTKYTSEKEEGTPWNEDCGKEKPEEIQDPAALTSDAEQPSGFTFSFFDSDTKDIKEETYRVETVKPGKIVWQEDPRLQDSSSEEEDVTEETDHRNSSPGEASLLEKETTRFFFFSKNDERLQGSDLFWRGVGSNMSRNSWEARTTNLRMDCRKKHKDAKRKMKPK

SEQ ID NO: 18656 - DNA, 2175 bp, Homo sapiens
  CDS (82)..(1407)
acgcggcggcgtgccagcctagccactctagcgacggcggggaagagtgtgtacgtggtgggggcttcctcggtggcgggcatggaggcttcgcgctgccggctcagtcccagcggcgacagtgtcttccatgaagaaatgatgaagatgcgacaggctaagctggattatcagaggctactacttgagaagaggcaaaggaaaaagcgccttgagccatttatggtgcagcccaatccagaagccaggctacgtcgggcaaagccaagggccagtgatgagcagactcccttggtgaactgtcatactccccacagcaatgtcatcttacatggtattgatggtccagctgctgtcctgaaaccagacgaagttcatgctccatcagtaagctcctctgttgtggaagaagatgctgaaaacaccgtggatactgcttccaagccaggacttcaggagcgtctccaaaagcatgatatctctgaaagtgtgaacttcgatgaggagactgatggaatatcccagtcagcatgtttagaaagacccaattctgcatcaagccagaattcaaccgatacaggcacttccggttctgctactgccgcccaaccagctgataacctcctgggagacatagacgacctggaggactttgtgtatagtcctgcccctcaaggtgtcacagtaagatgtcggataatccgggataaaaggggaatggatcggggtctcttccccacctactatatgtacttggaaaaagaagaaaatcagaagatatttcttcttgcagctagaaagcggaaaaagagcaaaacagccaactaccttatctccattgatccagttgatttatctcgtgaaggagaaagttatgtcggcaagcttagatccaacctcatggggaccaagtttacagtttatgaccgtggcatctgccccatgaagggccggggtttggtaggagcggcccacacccggcaggagctggctgccatctcctatgaaacgaacgtacttggatttaaaggtcctaggaaaatgtctgtgatcattcctggaatgacactgaatcataagcagatcccctatcagccacaaaacaaccatgacagtttgctctcaaggtggcagaacagaactatggaaaatctggttgagctgcacaacaaggcccccgtctggaacagtgacactcagtcctatgtcctcaacttccgtggccgggtcactcaggcgtctgtgaagaacttccagatagtccacaaaaatgaccctgattatatagtcatgcagtttggacgtgtggcagatgacgtgttcacactggattacaactacccactttgtgcagtacaggcctttggcatcggtctttctagctttgacagtaagctggcgtgtgaatgagagaacagtcaggcagggagcccttctccccacagagctttcaggagcagacagtggcctccccttcccctccctgccccaggacttaaagagcaatagtttgccccttttggaatgatctctgaatatataaaacacacacacgaagagcaatagtttgccccttttagaacgacccctgaatatataaaacacacacacgaagagcaatagtttgccccttttggaacgacccctgaatatataaaacacacacacaccccgcgcactctcactccttttccaggtttcatagacttggtgagggatcacagcttagcatgggtgagagatgatttaaagcacagggagattcttgtcacattggggtctccaaagctagaatgggatttcatgtgcttggaaacttgcagtagaatcagggactgacatcgcagttcctctcctctcttcattccctcacagcagattggccggcaccaatcttagtcaagagtggctgtgatcacatttgtgatcaattatgtgagaattttatataattgtcttcatttcaattaaggctgaaagcataaactctagaggtgactcagtcaggactgacagtaatgtgataattgccttcattttcaacccaggagtgcctctcacagctatatgactacggatccattagtgaggagcgacacacacacctgtaggcatcctgtgcaaacactttgtcattatcaagagagatggcagtattgaccatttagtttagtt

SEQ ID NO: 18657 - protein, 442 aa, Homo sapiens
MEASRCRLSPSGDSVFHEEMMKMRQAKLDYQRLLLEKRQRKKRLEPFMVQPNPEARLRRAKPRASDEQTPLVNCHTPHSNVILHGIDGPAAVLKPDEVHAPSVSSSVVEEDAENTVDTASKPGLQERLQKHDISESVNFDEETDGISQSACLERPNSASSQNSTDTGTSGSATAAQPADNLLGDIDDLEDFVYSPAPQGVTVRCRIIRDKRGMDRGLFPTYYMYLEKEENQKIFLLAARKRKKSKTANYLISIDPVDLSREGESYVGKLRSNLMGTKFTVYDRGICPMKGRGLVGAAHTRQELAAISYETNVLGFKGPRKMSVIIPGMTLNHKQIPYQPQNNHDSLLSRWQNRTMENLVELHNKAPVWNSDTQSYVLNFRGRVTQASVKNFQIVHKNDPDYIVMQFGRVADDVFTLDYNYPLCAVQAFGIGLSSFDSKLACE

SEQ ID NO: 18658 - DNA, 3449 bp, Homo sapiens
tatgtcaagaacttgtggcttccttaggtaaggattacttaaattggatcggagttgttttctgttttaggtagctgacttagaaacctactaactaataagtctttaaaatagagaaaaattaacactaaacaactaatccaagttttttcttaaatccaattctgatgtataaattttgaataatattaggttcttaactggaaattaccatttcagggtttgaaaaggactaggtgcgtataaaaagttcagcccctcatctgttagactgattattggtaagactctttcacttagtcagcaagctgtgcaaagcaaatactggtatgcatcctcagcaattgagatttgaaattgtaagcaaaagctattcttttgcattcctgtgtccaaatgtcatcctaaagaacttgctgacttatgccagtttgggttttagagtaagttaactgcttgttatatggcaggtgattggctgatgctgcatttctcctccccaggcagcaattcccccaggcaagcaaccgtcttcactagcttctccaaatcctcccatggcaaagggctctgaacagggcttccagtcacctccagcaagtagtagttcagtaaccattaacacagcaccctttcaagccatgcagacagtatttaacgttaatgcacctctgcctccacgaaaagagcaagaaataaaagaatccccttattcacctggctacaatcaaagttttaccacagcaagtacacaaacaccaccccagtgccaactgccatctatacatgtagaacaaactgtccattctcaagagactggtaagatctttgcatatgatatttggatgacttagagggacagccaattgaatggacagcaagtctaggaagtctgtagtgacactttagaagtattttcctgaccagtaagcattatttctttacatgttcctccagtgttgagaaaaacctaatgcccttttttgtgttaagtttacctattaattttaatttttgtagagatagaacttagatgacggatttaaccttgaagtaggtttgtatttttaaatctatttgctttgattaccacagacagtgattgaggtagatgggcactatctggctgcttatatgaaggttttgaaaccattctgttaatccttttaacaaatggttatctgtccttttctatcttataataaaagattgaagatatgacttagtatgctcattgtactgtttgcttagagatgggaggctattttgatttttcatgctgttctaaatcatgaaagaataggtaactttgtactcatttcttaatttaaatttaagaagcacttgtagattttttgtattggtatttcagatccctattgagttttttaactgaagtcggagcaaatgaattgagcattctgagtacttggctaatcaagtgatgaagaggtagtaatatgaattctgggacctaggcatagatgacctgattctgttctcccctctactgttgaaagacagggcaggtgacttacgtaagggatatttttgtcaggtgccttctcagatattaattagaatccattttcttttactccctcatctggagtatttagcctgctttttaaaaattgtcgtaaagtatacataacataaaaattaccattttaatcatttttaactatatagttctgtggcattaagtacaaccaaactgttgtgtaattattaccactgtccacctccagaacttttcatctccccccaactgaaactttgtaatcatttaatactaactcctcctcctcctctccccccagcccctggcaaccaccattctactttctgattctgaaaatgactgctctaggtacctcatataagtggtatacaatatttgtgcttttgaaactagcttattttactaggcatgtcttaagggttcattcatgttgtagcatgggtcaaaattttcttccttttttaggctgaataatattccattatatatatgaattacgtatttgagtcatgtagatgaattatatacatgaatatatgtatctcctatttatttttaaaggcagcaaattgtattaatgattttgatatatattggcttttaagtataaagactattaccatttaactcttggaccctaaaatcgtttttcttaagcagcaaattatcatcctgatggaactattcaagtaagcaatggtagccttgccttttacccagcacagacgaatgtgtttcccagacctactcagccatttgtcaatagccggggatctgttagaggatgtactcgtggtgggagattaataaccaattcctatcggtcccctggtggttataaaggttttgatacttatagaggactcccttcaatttccaatggaaattatagccagctgcagttccaagctagagagtattctggagcaccttattcccaaagggataatttccagcagtgttataagcgaggagggacatctggtggtccacgagcaaattcgagagcagggtggagtgattcttctcaggtgagcagcccagaaagagacaacgaaacctttaacagtggtgactctggacaaggagactcccgtagcatgacccctgtggatgtgccagtgacaaatccagcagccaccatactgccagtacacgtctaccctctgcctcagcagatgcgagttgccttctcagcagccagaacctctaatctggcccctggaactttagaccaacctattgtgtttgatcttcttctgaacaacttaggagaaacttttgatcttcagcttggtagatttaattgccagtgaatggcacttacgttttcatttttcacatgctaaagctggcagtgaatgtgccactgtatgtcaacctcatgaagaatgaagaggtcttggtatcagcctatgccaatgatggtgctccagaccatgaaactgctagcaatcatgcaattcttcagctcttccagggagaccagatatggttacgtctgcacaggggagcaatttatggaagtagctggaaatattctacgttttcaggctatcttctttatcaagattgaaagtcagtacagtattgacaataaaaggatggtgttctaattagtgggattgaaggaaaagtagtctttgccctcatgactgattggtttaggaaaatgtttttgttcctagagggaggaggtccttacttttttgttttccttcctgaggtgaaaaatcaagctgaatgacaattagcactaatctggcactttataaattgtgatgtagcctcgctagtcaagctgtgaatgtatattgtttgcacttaatccttaactgtattaacgttcagcttactaaactgactgcctcaagtccaggcaagttacaatgccttgttgtgcctcaataaaaaagttacatgc

SEQ ID NO: 18659 - DNA, 4749 bp, Homo sapiens
  CDS (3371)..(4060)
gcgggtgttcggctacgtcactggggcgctacggttcctggagctgggcagtcttctcgtcagagtggggactggtaagagcgacctccccgccaggtcctgtgtgttgccggctgaagaagggatgatgattattccccaccttctaagagacaaagaccaacgagccaccacagccaccagtcccagaacccgccaatgctggggaatggaaaatgagggagttcaactctggccctcacaatccagtggaggagacgaaactcatctgcctctgtccctctgggcacacctcatgccaggtgcatctgtggacaggggccatgctcctgggcttccaaagttggagaaagctgccaggctcagacccacctaagctgaagattcccttgagaacaagtactgtcctgtggtttcatggcctttcttccatttgtggttcttgcgaagtggaatttaaatgacatcttatcaagatggataaaccctggtttcccagtgctggaatatagaaaatggatggacaagtaaatcccactcagtacccataggccaggcatggggacctcaacacacctgagccccagacatcacctttcattctggacctaccatgaaagacttctgaatccaggaagagaaactgactgggcaacatgttattcagaaacaggaccttgccctgtcactcaggatggagttcagtggtcctatcatggctcattatagcctcaaactcccaggctcaagcaatcctaccatgtcagccttcccagtagctgggactacagctggatctaccatgaaagacttctgaatccaggaagagagactgactgggcaacatgttattcagggtctccctctgttgtccaaggctggagtgtagtagtgctatcacagctgactgcagcctcaaccttccaggctgaagtgattctcccatctcaacctcccacgtggctgagactacaggtgcttgccaccatgcccaactaatatttggaattttcatataagtggattccagaggggtgacagcaaaacgtgggaccatccagttgcaggaaaacaagcttaacacgcccactgattttacattatgctcctaccacccggcagcctctccaggcccagaactttctccagtcagcctctacagaccaagctcatgactcacaatggcctatttaggcccataccctacctcacggcagtctccgcagatgagcctactgcctcacaacagcctccacaggcacagctccatcattacaatggcctctttagacccagctcctgcctcccagccttctctccaggccctgaactttctgaagtcgacctcaccaggcccagctcatgcttctttgcagcctctccaggcccagctcctgcatcttggtggcccctccaggcccagcctctgcctcccgtcggcctctacagtcccaacatctgcctcatagcagattcttgaggcccagcatctgcctcactgtggaccccccaagccaagctcccaacctttcagcagcttctacacacccagctcctgccacccagtggcctctttaggccaagctcatgcttcacaagggcctttccaggcccaactttcgtctcatggcaaccttccctggccagattcctgcgtgtctcccagcagcctagacaggcccaggtcttgcctcacactggcctctctacatccagctcatgcctcacggtgacctctccaggcacagctcctgtcccagaacgtcatctccgggcccaaaacttactcgagtcagcctctctagtcccaactgctgcctcctggtggcctatgaaggcccaaaatctcctcaagttgacctctcccggcccagctcctgcctcctgtcagcatctacaggcccaacctctgcctcatgggggcttctccgggcccagctcttcctattggctgagtctacaggcacaactgctgcctcacaacagccttttttggcccagttcctgtccagttcatggcggccaatgtaggcccaaaacttcctcaggtcatactctccaggcccaccttctgcttcctggtggcatgaacaggcccagctttgacttgagaacagcctctgcaggccctgcacttgcctcccaggggcttttccaagcccagctcttgcctcatggcagctgccccaggccaaatttcttcctgcctgccagcagcctcaacaggcacagctcctccctcacagtggcccatttaggccccactcatgactgtcgggccatttccaggcctagtgcctgcctcctggctgactctttcttgaagcccaaaacttcctcaaatcagccttttgcctaacttctgtctactgtcggactctacaggccagcctctgcctcacagtggaccctccagacccagatggtgtctcactgtggcatcctcaggcgaagctcctgcctttcggcagcctctacaggcccagctcctgccttgcagtggcctctttaggccaagctcatgccgcatggcgacttttccaggcacagcttttgccttttgcagcctgtccaggcccagaatgtccttaactcggcatctccaggacgagcttatcctcccagtgcgtctacaggcccgtctcctgcctcacaacaacctcttttggcccaactcctgctgagctgctggcagcctctgtaggccacagacttcttaaagtaaagctttccagccaccttcggcctcccagcagcctcagcaatcaaactattccctcactgcggccaccgaaagccaagtttctccctgcctcatggcatcctccgaaaactgagcatttgcctcacggtggcctccccaggccacgaatctgcctgcctcccaggcaggtgctgcctcacaatggtctctttaggcccagctcatgctaaaagatggactctccaggtacagctcttgcctcctggcagcctctgcaggcccaaattctccaaaagttggcctctcctaactcagctcctgcctcatgtcggcctacacaggcccagactcttaccacacagtagaccctccaggcccaccacttgcctgatcatagcctcctaaggccaagctcctgcctttcagcagcctctacaggcccagctcctgcctcgcaattgcctttgtaggccaagatcatgccgcgaagtggcctttcctagcctaacttttgctttttgacgcatactccagtcccaaaacttcctccagtcagccggtccaggccaagctcttcctcccaaaggcttctgcaggccaaaatcatcctgaagtcaccctctgcaggcccagctcctgcctccaagtgctgtgtaggccaagctaatgcctcacagcacactttccaggctgagcgtttccttttgtgcatcctctccaagccctgaacttactccacttggcctctccagaccaagctctccctcccagtggcctctacaggccaaaattgtcctcaggtctgcctctccagggccacctcttagctaccagtggcttctgctggccaaaatcgacctcaagtcagcctcttcacacccagctcttgcctctgagtggcctctccaggagcaaaactttctcaagtcggcctctccaggcccagcctcctgcttcccgagggcatgtacaggcccagcctctgcctcacagcagactctccacacccagctcatccctgtctgcggcctctccagtccaaagctgctgctgccttttggcagcttgtacaggctcagctcctccctcacggtggcctctttcagcccaactcatgcctcttgcaacctgcccaagtgtcagctcctgtctcacactggcctgttgagggccagctcatgcctctcgtggcctcaacaggcccatcccctgcctgtcggcggcctctacaggcccggcctctacctcacagtgggctctccaggcccacctcttcctcaccgtggcctcctggggcaatgctcctccctctcgggagcctctgcgggcccagctcctgcctcccagtggcctctgtagaccaagcccgtgcctcagggcagcctttccaggcctagcgtttgctgctttgcatcctctccaggccctggacttcctccagtcggcctctccaggcccagctcttcctctcggcggcctctgcagggccagactgtcgtcaagtcggcctgtccagggccagctcctgcctcccggcggcctctgcaggcccaagtcgttctcaagtcggcttccccaggcccagctccggcctcttggcggcctctccgggtgcaaaagttcctcgagtcagcctctccaggcccagctcctcctgcctcccagtggcctctttcggcccagcccagctcttcctcccggctgcgtctccaggcccgactttggcctcccaacaacgtctttggactcagctcctgcctctcaaaggcctgcacgggcccggcctcggcctcggcctcacagcggactctccacgcccagctagctctcgcctcactgtggcctccccagtccaaagctcctgcctttcggccacttcagcaggtccagctcctgcctgccagtggcctctttaggcccagctcattcctcacaacggccttcccaggccccgtttttcccttccggcagcctcttggcctctaatttgtttatcttttgtgtataaatcccaaaatatggaattttggaatatttccaccatt

SEQ ID NO: 18660 - protein, 230 aa, Homo sapiens
MPHSTLSRLSVSFCASSPSPELTPLGLSRPSSPSQWPLQAKIVLRSASPGPPLSYQWLLLAKIDLKSASSHPALASEWPLQEQNFLKSASPGPASCFPRACTGPASASQQTLHTQLIPVCGLSSPKLLLPFGSLYRLSSSLTVASFSPTHASCNLPKCQLLSHTGLLRASSCLSWPQQAHPLPVGGLYRPGLYLTVGSPGPPLPHRGLLGQCSSLSGASAGPAPASQWPL

SEQ ID NO: 18661 - DNA, 2845 bp, Homo sapiens
  CDS (169)..(1074)
agcgcatcaacagaagaaaaccatctagagtgggttggattagtagaatctaaaatccgtgtacttgttggaaacttggaacggaatgaatttattactcttgcccatgtgaatccccagtcattcccagggaataaggaacatcataaagacaacaattacgtatcaatgtggttccttgggataatttttcggagagtagaaaatgcagaaagtgtcaacatagacttgacatatgatatacagtcatttactgatacagtgtacagacaggcaaacaatataaatatgctaaaggagggaatgagaattgaagcaactcatgtaaagaaaaaacaacttcaccactaccttcctgcagaaattcttcaaaagaagaaaaagcaaagtctctctgatgtcaatcgaagctcgggcggacttcaatccaaaagattgtctctggatagcagttgtctggatagctccagagacactgataatggaacaccttttaattctccagcgtccaagtctgatagcccttctgtaggagaaacagaaaggaatagtgctgagcctgctgctgtaattgtggagaagccactgggtgtaccaccagcccaaggactttccattccagtgattggcgcaaaagttgactctacagtaaaaactgtatcaccccccactgtgtgtaccattcctaccgtagtaggacgaaatgtcattcctagaatcacaacacctcacaaccctgcccagggacaaccgcatctgaatggaatgtcaaatataactaagactgttacacctaagagatcccattccccatccatagatgggactcctaagaggttgaaagacgtagaaaagtttattcgacttgaatcaacatttaaggacccccgcactgctgaagaaagaaaaagaaaatcagtggatgccattggaggagaatctatgcctattccaactattgatacatcacgcaaaaagagactacccagtaaagaactaccagattcatcatctccagttccagcaaacaacatccgtgtcatcaaaaattccattcgactgacccttaatcggtaaaagcagtgcctcctcacttaagtgaacaagcaatcatttagtggcatagatgcagccacttgttttttaaatagaagtggctgtcatacgtgaaataaggtgaaagtgacagccttcagtctaataaccttgaagtggtttttgaactgtcaaactttgacctgtagatgctgtagcattctctcactgattgctacatacacttctctgaggatcacctgctgtcaaattgccatctacagtattacagctttgcatttgggggttttactgccttaactttcaatgcttgttatgggaaccagttcttagccacttggacactgataacaagtcctgaactccttttttgttttgttttttgtgtttttctttttttgtcttatgttgtaatcattgtatagagctaaaaaaattgaaaacaaacaaaaaaattgtcttgtattttccaaatgttaatacatttactttagcattgaagccactttgaaacctgagataaatgaatgtgaggtatcttttctgctttcctcatttgtgtagatgtactgtctgttctgttgatttaaattatttttttccagattggcacatgaaatatttaaacttttttgtgtgcctttctgtccaaatgttgcatagttaccagggaagattagtccagtgattacataagagttgggcaccataaattctctatattttgcctcccatggaggcctttgaaatgcatctttattaaaaatcaaaatataaccaggatactgaaagtcagtatatgaatggtaaaattgttacatatcctatttcatgccattcttgttagttgactggtattttttactgaggagcaactcattccagcatcaacaataagataacctttaagtatggcacacttgtatttttgaggtgtaaaattaacttggcatgataattcctgatcattatttaccccacaacttcaaatagtttcttcacggactaggcatgcagaaataagcagtggattttattgaaacctaaaggcattttgaatgacattgttaccaaccattaattggctcaggacctttgtaatttttatttaactatatgagttgtctttttttacgctgcttttttcaatgcatttcttaatattttttaagtttcatgaatgcatgctcagtttattaaaatccataaccatgtaattcttgtaatatgttgattcagtgttttgtaaatgaagtcgtatgtattttcagagtatttttgtatgtactgtaagataccatcttttcaaagagaaacgtttaaaacctttattgtctctccttagtctaattttttaaatatggattatgcttgaattactatatttaaaatgaaaatgtatagattacacagccaggaatgctagtatctaccaccttctttagatttcactcagcatttagtaggtccagtaggaaaaacccaaaatggtacattgagtagtgtggggaagacacctcgtgtattataggactcacgggatgccatctagcaagtggagaaatagcagtccattttctcttgcaagccctttaccattgagttgaaattcttgaattgccagagagccgtatcctccaggtcccactcctgttcattgccccttaggtctccaaaatgtaaattctaatgtttaccttgtaccatggaaaacatgaaaagagtcttagaagtaaagaacaacaaggaaaaaaatgtttgttctattattccctttttatatagcagc

SEQ ID NO: 18662 - protein, 302 aa, Homo sapiens [sequence omitted]

SEQ ID NO: 18663 - DNA, 2289 bp, Homo sapiens
aaatcttttgtagttatcccacagttcttatatcttgtttttttattcttctctttgcttttcaggtgtggatgtttctgctgatatattctcaagctctttagttggctgtttcttggccaataataagcctaccaaagacattcttcatttctgttacactgtcttcaatttctagcatttctttgtggttcttagaatttccatctctgtgtttacactgcctgtctgttcttggatgctgtctgctttatccagtagaacccatggcatatcaatcataattgttttaaattcccagtctgataatttcagcaatcctgctatatctggttctggttcttactctttctctttaaactaacttttgccttttagtatgcttgtaatttttccttagctggacatggcatactggataagaggaaatgctgtaagcaggcctctagtaatcatgataagctgtggggagaggggcagcattctattgtccagggattagatgtcagtcttgcagtgagtctgtgcttctgcactgcgaacttcagtttttcccaccctttagttgggtcaggatgtatagagttggctggagttggatatttcccttcctccaggtcactgaagctctgactaaaactccaggtgtggtggcttatgcctgtaataccagcactttgggaggccaaggcaggtggatcacctgaggttgggagttcatgaccagcctgaattgcttgaatccaggaggtggaggtcacagtgagccgagattgtgatactgcactccagcctgggaaacagtgagacactgtctcaaaaaaataaataaataaataaaaggctaggcgcagtggctcaaccctgtaatcccagctaattttgtatttttagtgaaggcagggattctccatgttgatcaggctggtctcgaactcctgacctccagtgatctgcctggtttgacctcccaaggtgctgagattacaggcatgagccatcacgcccagccagttcttcaattcttacagtccctttccatgtcattaaagaactcacactggagagaaatcttatcaatgttagaattgtggtaaagctctctgttgttcccatttacatgaaagatgtgaacagtcacattgtagaaaaatgctgtgagagttgggaatctggaaccacttctttattatctcaggtcataatggacttgtaagaattcacagtggcaggaaaccctatgtaaatggaaaatatgggaaaggcttcatttaatccataggactgataccacaaaactcccactaggagaaaacctatgtttatacggaatgtgggaaaatcttcacttatttctcaagccttaaagtgtatgtcaggattcccagtggagagaagccatattgatgtaaggaatgtgggaaagcccttgcctgccacttagtccttgataaacattttagaacacaaactggagagaaactatgaattcaaggattgtgggaaaacccttttatgttccacaagctttaatattcatatgcaatgtatgctggagaataacttgatgactataataagtggaatggcctaggtcagggatccccaaacccctgggccatggactggtactggtctgtggcctgctaggatccagggtgcacagcaggaggtgaatgtaggatgagcaaacattactgcctgagctcaactttctgtcagatcagcagtggcattagattctcataggagcatgaactttattgtgaactgcacatgcaagggatctaggttgcacactccttatgagaatctaatgcctgatgatctgaactggaacagtttaatccccaactccagtccgtgggaaaaatgtcttccacgaaactggtccctggtgccaaaaagttaggggaccactgatttagattatgtcacatgtcccatccactcattaacattaaggctttcatccctgggacctcaagataatggtggtatttagagatgtggtttttttaaagaggtgattttaaaatgaggcagttagaatggggccctcattcaatatgactggtttccttataagaagtgaaagagataccagggtagcaggcacagaattttatgtgaagtgaccggaaatggttaccttcaaggcaaagagagattcctggaggagatccttcttttaaggctcattatagaggaaatcatccttatctacactttgatcctggacttccagcctcaaaaattatgagcaaataaatttctgttgtttaagcc

SEQ ID NO: 18664 - DNA, 4445 bp, Homo sapiens
  CDS (220)..(3093)
cccggaacccgcggtcgccaccgcggcggcggccccaggctggaggcgtccgggcgcctctttcctccagcctctgggactgcgctgctcgcagtctcctcgccctgcctgggcttgagaaacctagtgcataccccaaagagggtttttgtgtatgtgtgtgtttttaaagggtggctatgatgactgggccttggagatgtgagactgggaggtaaaatgcacacttgctgccccccagtaactttggaacaggaccttcacagaaaaatgcatagctggatgctgcagactctagcgtttgctgtaacatctctcgtcctttcgtgtgcagaaaccatcgattattatggggaaatctgtgacaatgcatgtccttgtgaggaaaaggacggcattttaactgtgagctgtgaaaaccgggggatcatcagtctctctgaaattagccctccccgtttcccaatctaccacctcttgttgtccggaaaccttttgaaccgtctctatcccaatgagtttgtcaattacactggggcttcaattttgcatctaggtagcaatgttatccaggacattgagaccggggctttccatgggctacggggtttgaggagattgcatctaaacaataataaactggaacttctgcgagatgataccttccttggcttggagaacctggagtacctacaggtcgattacaactacatcagcgtcattgaacccaatgcttttgggaaactgcatttgttgcaggtgcttatcctcaatgacaatcttttgtccagtttacccaacaatcttttccgttttgtgcccttaacgcacttggacctccgggggaaccggctgaaacttctgccctacgtggggctcttgcagcacatggataaagttgtggagctacagctggaggaaaacccttggaattgttcttgtgagctgatctctctaaaggattggttggacagcatctcctattcagccctggtgggggatgtagtttgtgagacccccttccgcttacacggaagggacttggacgaggtatccaagcaggaactttgcccaaggagacttatttctgactacgagatgaggccgcagacgcctttgagcaccacggggtatttacacaccaccccggcgtcagtgaattctgtggccacttcttcctctgctgtttacaaaccccctttgaagccccctaaggggactcgccaacccaacaagcccagggtgcgccccacctctcggcagccctctaaggacttgggctacagcaactatggccccagcatcgcctatcagaccaaatccccggtgcctttggagtgtcccaccgcgtgctcttgcaacctgcagatctctgatctgggcctcaacgtaaactgccaggagcgaaagatcgagagcatcgctgaactgcagcccaagccctacaatcccaagaaaatgtatctgacagagaactacatcgctgtcgtgcgcaggacagacttcctggaggccacggggctggacctcctgcacctggggaataaccgcatctcgatgatccaggaccgcgctttcggggatctcaccaacctgaggcgcctctacctgaatggcaacaggatcgagaggctgagcccggagttattctatggcctgcagagcctgcagtatctcttcctccagtacaatctcatccgcgagattcagtctggaacttttgacccggtcccaaacctccagctgctattcttgaataacaacctcctgcaggccatgccctcaggcgtcttctctggcttgaccctcctcaggctaaacctgaggagtaaccacttcacctccttgccagtgagtggagttttggaccagctgaagtcactcatccaaatcgacctgcatgacaatccttgggattgtacctgtgacattgtgggcatgaagctgtgggtggagcagctcaaagtgggcgtcctagtggacgaggtgatctgtaaggcgcccaaaaaattcgctgagaccgacatgcgctccattaagtcggagctgctgtgccctgactattcagatgtagtagtttccacgcccacaccctcctctatccaggtccctgcgaggaccagcgccgtgactcctgcggtccggttgaatagcaccggggcccccgcgagcttgggcgcaggcggaggggcgtcgtcggtgcccttgtctgtgttaattctcagcctcctgctggttttcatcatgtccgtcttcgtggccgccgggctcttcgtgctggtcatgaagcgcaggaagaagaaccagagcgaccacaccagcaccaacaactccgacgtgagctcctttaacatgcagtacagcgtgtacggcggcggcggcggcacgggcggccacccacacgcgcacgtgcatcaccgcgggcccgcgctgcccaaggtgaagacgcccgcgggccacgtgtatgaatacatcccccacccactgggccacatgtgcaaaaaccccatctaccgctcccgagagggcaactccgtagaggattacaaagacctgcacgagctcaaggtcacctacagcagcaaccaccacctgcagcagcagcagcagccgccgccgccaccgcagcagccacagcagcagcccccgccgcagctgcagctgcagcccggggaggaggagaggcgggaaagccaccacttgcggagccccgcctacagcgtcagcaccatcgagccccgggaggacctgctgtcgccggtgcaggacgccgaccgcttttacaggggcattttagaaccagacaaacactgctccaccacccccgccggcaatagcctcccggaatatcccaaattcccgtgcagccccgctgcttacactttctcccccaactatgacctgagacgcccccatcagtatttgcacccgggggcaggggacagcaggctacgggaaccggtgctctacagccccccgagtgctgtctttgtagaacccaaccggaacgaatatctggagttaaaagcaaaactaaacgttgagccggactacctcgaagtgctggaaaaacagaccacgtttagccagttctaaaagcaaagaaactctcttggagcttttgcatttaaaacaaacaagcaagcagacacacacagtgaacacatttgattaattgtgttgtttcaacgtttagggtgaagtgccttggcacgggatttctcagcttcggtggaagatacgaaaagggtgtgcaatttcctttaaaatttacacgtgggaaacatttgtgtaaactgggcacatcactttctcttcttgcgtgtggggcaggtgtggagaagggctttaaggaggccaatttgctgcgcgggtgacctgtgaaaggtcacagtcatttttgtagtggttggaagtgctaagaatggtggatgatggcagagcatagattctactcttcctcttttgcttcctccccctcccccgcccctgccccacctctctttctccccttttaagccatgggtgggtctaactggcttttgtggagaaattagcacaccccaactttaataggaaatttgttctctttttccgcccctctccttctctcctcccctcccctcccttctcattccttttctttgtttttaaaggatgtgtttgtatgcattctggacatttgaattaaaaaaaaaagtattgtgatcctgtaaaggatcaccatagatgtggacaaatcattaaaattacagagctatatgatccataattgattagtcaaaataacttgttgatgaaatatacaaatattttattgtagcacctatttttatatgcacatttagcattcctctttccttcactatttagcctatgattttgcagaggtgtcacactgtattaggatctgcatttctaaaactgacgtggtatcaggaaggcattttcaatcattcaaaatgtggagaatttaatggctaaatctttaaaagccaatgcaacccacccaattgaatctgcattttcttttaagaaaacagagctgattgtatcccaatgtattttaaaaaatagggcaattgattgggccattccgagagaattgtttgcaagttttgggttttattagaaaatatttgaaagtatttttattaatgaaccaaaatgacatgttcatttgactactattgtagccgattttcgattgtttaaccaaacccagttgcatttgtacagatccacgtgtactggcacctcagaagaccaaatcatggactgtacaagtctctatacaatgtctttatccctgtgggcagcaagcaatgatgataatgacaaacaggatatctgtaagatggggctactgttgttacagtctcatatgtatcccagcacatgtaattttttaaatagtttctgaataaacacttgataactatgtc

SEQ ID NO: 18665 - protein, 958 aa, Homo sapiens
MHTCCPPVTLEQDLHRKMHSWMLQTLAFAVTSLVLSCAETIDYYGEICDNACPCEEKDGILTVSCENRGIISLSEISPPRFPIYHLLLSGNLLNRLYPNEFVNYTGASILHLGSNVIQDIETGAFHGLRGLRRLHLNNNKLELLRDDTFLGLENLEYLQVDYNYISVIEPNAFGKLHLLQVLILNDNLLSSLPNNLFRFVPLTHLDLRGNRLKLLPYVGLLQHMDKVVELQLEENPWNCSCELISLKDWLDSISYSALVGDVVCETPFRLHGRDLDEVSKQELCPRRLISDYEMRPQTPLSTTGYLHTTPASVNSVATSSSAVYKPPLKPPKGTRQPNKPRVRPTSRQPSKDLGYSNYGPSIAYQTKSPVPLECPTACSCNLQISDLGLNVNCQERKIESIAELQPKPYNPKKMYLTENYIAVVRRTDFLEATGLDLLHLGNNRISMIQDRAFGDLTNLRRLYLNGNRIERLSPELFYGLQSLQYLFLQYNLIREIQSGTFDPVPNLQLLFLNNNLLQAMPSGVFSGLTLLRLNLRSNHFTSLPVSGVLDQLKSLIQIDLHDNPWDCTCDIVGMKLWVEQLKVGVLVDEVICKAPKKFAETDMRSIKSELLCPDYSDVVVSTPTPSSIQVPARTSAVTPAVRLNSTGAPASLGAGGGASSVPLSVLILSLLLVFIMSVFVAAGLFVLVMKRRKKNQSDHTSTNNSDVSSFNMQYSVYGGGGGTGGHPHAHVHHRGPALPKVKTPAGHVYEYIPHPLGHMCKNPIYRSREGNSVEDYKDLHELKVTYSSNHHLQQQQQPPPPPQQPQQQPPPQLQLQPGEEERRESHHLRSPAYSVSTIEPREDLLSPVQDADRFYRGILEPDKHCSTTPAGNSLPEYPKFPCSPAAYTFSPNYDLRRPHQYLHPGAGDSRLREPVLYSPPSAVFVEPNRNEYLELKAKLNVEPDYLEVLEKQTTFSQF

SEQ ID NO: 18666 - DNA, 1965 bp, Homo sapiens
gtgctaggttttaaataccatccatatgctgaccacccctaaatgtacatctcttgctttaagatctcttcttacaccagacttatttgctcactgctgactttacatttccatttggatgttcgcaagacgtttaaaactcaacccggcccaaaatgaactctttattactctcccaaacctgctcttcccacagttttcaccatcttggctaacagccaatgacccagggctaaaacttaggaaccatttttaacttccctgtttctttcactttctaccatgcatttcatttcttccttcacaatcaagctaggatttgattgcttctcagttcctttattgctgtcaacctggtctcagccaccatctgtctcatgaaatcctgaagtaacctcctgtggctacctttactgttgacagttaattcttcacattgctgccatagttttacttttaatatgccagatcacatgactgcttaaaacgtacgatagcttttcatcttccttggagtaaaagccaaagccttatcatggcttgtaaaattctgtgtcttctggcctgcagttaacacctttgactctacatcctatttctctctaatattcctcgaacatgccaagcaggcttctacttggggacctttgcagttgctattccctctcccagtttcgctttcctcctagataattacataatttgttcccattcttcttttaggctcagctcaaatgttactttattagaggctttcctttagcactctgtatacaaagattccccttcatttgctttatttttcttcatagcatgttccaccacctgagatattgcttatttatttagtgtctgtttcctggttcctggaacatgaactccatgagagcagagaatttttgtttcctgcagtttttctagctcctagcctagtacctggtatactataggtgcttagtaaatatttattgaatgaatgaatatatgtgttttaatatttgtagacaatgttttctctcaccaggtaccaggtcatcagtacaccatctgatattttcatggtgatggaatatgtctcaggaggagagctatttgattatatctgtaagaatggaagggtaagctgttctgctttaattctgtatgtattttgtaactcccctttatcctttactagcatcaaaatgtcagcaaccaattttaagaggtctatttaataaccagttcccttagtcatatatttgtttagaatcataaactatgtagaactagaaaggatcttaaagattatctccttagcctgtttatacagatgtggatactgagcctcgcagcttatatgattgctcacagtaacgtgatttattaatgacggaattggcttgagcccccagaactcataatcctcagacttatgcttccagggtatacaaatactttgaatatgtatcttaatgtaattaatcgttacaaaatatattattattacttaaagatctaggccttgctagtcaattctagccacatttaaattgcattcattttttggtttcagaaatctgatgtacctggagtagtaaaaacaggctccacgaaggaggtaggaattagatataaagaatttacagctggaaggaactttgtaggacattttgaacactaccttaagttacagatacaaaaactcaacactgccctctgcccatactttttctcatacccaggttatgtggtatgcaaaagcccctttgtgggagagctgtagctagccctgaaaagagagcttttctctcaattttaagttatttacattactcattcatttgttctatatagcatgtctatttacttttatcaaaatcaaacttattaaccaagttaattttgattttactatttcttaacatgattcatttctatttcaggtactcccctttactcctgcttctccttaccaaaaaaaag

SEQ ID NO: 18667 - DNA, 2881 bp, Homo sapiens
  CDS (101)..(1699)
aaataacgaagatccctatggagatatctggttaacagacaagcaacctgaggaacacaactttagcgataccaaaataatttccctttctcatcttgaaatgacctggactaacagaagaaattttcctgcattgcttgtgaggatcttacataaatcaaaactgcgatactatggaaaacctgataaaaagatgattgaaccatatcagacctttttggaagttgctgacagttcaggcacagtgtcagtgattatgtggaatgccctgtgtcctgagtggtataaaagtttgcgggttggtttagttcttctgcttcaagactattctgttaaaaagagttatccattcagaatacagcctgtccccgtggatccacagatcaaactaatttctacaatggaaatctgcctgaatcttcgagatcccccaacaaatataattatcattccagaaaagcaggtgaaaccagaatggagactgccaaagctaaatcaccgatttaccacaaggtcagaactggatgatatgccagaaaattgcatctgtgatgttattggccttttagtttttgtaggaagggtccagcggtcaaaaaagaaagaaaaccgtgaagatttttggtcatatcgctggattcacattgctgacggtacttcagaacaaccatttatagtggaactgttttcaacatcgcagccagaaatctttgaaaatatttacccaatggcatattttgtgtgtacacagttgaaagttgtcagaaatgacaatcaagtacctaagctgctttacctcaccactacaaatgagagtggagtgtttattactggtcatagaggccagccgtatacgtatgatgccaagaatgctaacagaccctcgacctctcaagcagctagagtagaaattcaagaaagaaatggtaaacggcatcaagatgatgagcctgtgaattctcagtatttccaaactacatctacaaatttaagtctgagcaataaaataagaattcttcaaggcccacacgctaatccagttgctgtacctcaaccaggagcttctgtacaaacaaagggaattaaaccgggcatgccaagcatcttcaaccgtcgagcaaatataaatgctaatctgcaagggaaagccagaaatactataagtgataggtgggagagtcagctgtggagagagaaaaagtttggcttaatagatcacctacactacagccgtgtttatcctgaaagtattccacggaaatttatgtttgaacacagaaagtttcttagtgaccagtataattctcagcctgcgaaatatgtaccaccagaaggaaggcccccaaaacttgatgattttaagagcgcccgaagccttggacattttgaagtaaccatactaggtctgaaccatgagatagcaatcgatgttgctttcctacccatgtattgtccagaagatattcgaacatctcaaatagacacactgttgacctccatgaattacagctgtgcatatccacaggacacaactggaaatgaccgattgccaggtccaagagcggttgcaggtgatattataaaagcagcaactgaactggatagagtgcatatcgtcggtatcttggatatctgtaatttgggtaataataaagtggaagtctatttgcacaagatttatagtccagagaatacttcttaaaagttagcaaatgaaattattacagattatacgagtgtactgctttaaagatattccatcattttgctggtaatttcagtaactgttttcagcaagaatattacatgagctctaaagttattaagcagttttatgttcgttttgtgtttagggagctttttaaaacacttcatttcagattcattattgaaaaaggtcatcaaaataatttttgtgtataagggaatttaccttgcttaccttactagtatgactattatcttgacttctggtaatttatgttcactattccatttgtgaagtgtactttcattctaaagcctcagtataaggcatcctaacttacaagagtaactttccatggacatttaacatccttccaattttattcacatataatgggaaattttgaattgccagtttgaagactgttctcctaaagtgttcaacctgcacttcttacaaccaaggtagtttgtatcattttcaaaagtacacattattagggtctagttgcccctggtccttagcttgctcagctgcaaaataagcgtgctaaattaaattgtcttaaggtttttccacttcattttgtgactttgtgtggttcgaatttctcagtattttaaccagtgtgttgatgttaaagtcaaaggctgcagtatgtctatattcttgctgtactcattggtagtttcagtatatgtaatgtgagtttaaatagtgaaattgtatctcatattaacatttcaaatgctcatattgaaaatggaaaatagtaaacacgggaattgattttattctggttgtctataatacttcattttaaatgtaaatggccactctgcatttgcaaggcccggtggttgacatctgtgtggtttgttagatgagacaaaatgaccattaaatgagtttatagattattctgtatcaagataaatctgattccagttaagctataaacttgtgggattttcttgtagccctatagttctgtgacttcatttgctatacgctttaaatgtgttgagcagcctatgaacctaaagacatactgcagtttgttcataaatgtattcagtcttttattctttataattgtgtgtaaatgttaactaaacagtggattcctctcgtgttacagttttgagtgaattattaaagaagttaaaatgc

SEQ ID NO: 18668 - protein, 533 aa, Homo sapiens
MTWTNRRNFPALLVRILHKSKLRYYGKPDKKMIEPYQTFLEVADSSGTVSVIMWNALCPEWYKSLRVGLVLLLQDYSVKKSYPFRIQPVPVDPQIKLISTMEICLNLRDPPTNIIIIPEKQVKPEWRLPKLNHRFTTRSELDDMPENCICDVIGLLVFVGRVQRSKKKENREDFWSYRWIHIADGTSEQPFIVELFSTSQPEIFENIYPMAYFVCTQLKVVRNDNQVPKLLYLTTTNESGVFITGHRGQPYTYDAKNANRPSTSQAARVEIQERNGKRHQDDEPVNSQYFQTTSTNLSLSNKIRILQGPHANPVAVPQPGASVQTKGIKPGMPSIFNRRANINANLQGKARNTISDRWESQLWREKKFGLIDHLHYSRVYPESIPRKFMFEHRKFLSDQYNSQPAKYVPPEGRPPKLDDFKSARSLGHFEVTILGLNHEIAIDVAFLPMYCPEDIRTSQIDTLLTSMNYSCAYPQDTTGNDRLPGPRAVAGDIIKAATELDRVHIVGILDICNLGNNKVEVYLHKIYSPENTS

SEQ ID NO: 18669 - DNA, 3563 bp, Homo sapiens
gctctgctgcggaggccgtagccgcgggtagttgggaggaaccgagatttacgcttggtaaggcaagttgcgagctgtccggcgccggtcgagttcctgccgccgtcgtcgtcaggcaggggagaagggggcccaacccctctagtgacagctgtttgctacctaatagggcttttcatcccaccgggccccagggccttcgttaggagcccagcaggctcaacttcttgctgtggttctggaaaagggagtgaccacctggctcaacacctctctctgtgatgtgtttgggagttttgggaaatgagacggctccgagggaagagcttgagggagcggcgtcgcactcgttcgaccttcccgggcctgggctttgtttctaggcattttaggttgaacgctctacatcttaactgagggcaggggaggtggccagagcatcccgctgagcgttttccgattccccagatggccaggcacctggtcctggtggctggacagtgaccccgtggacgcacatttacagctatagccattcagtgccgcggggaggtgaggatagtgatcctgggacctgctcgaggattcacccttgccccaagaacctgttccattcccaggaatgaaggcggtcaggcaggggaggagaagggggcctcaactcttctagtgacagcagtttgccacctaatagagcttttcagattttgtctcctcaggccattttactcagcctcggactatcaaggatggtcacattgaagctgtttttctgcagtcaggagcgaaaagtcccggctgttgaaggagaaactgaatctggttcaggagtcccaggttcctccctctgagaggccaggtggggcctgcgtgagtagcagttgttcaggtggcaggacactgctgttttcatcccacctggccccaggcccctgattaggggcccagagtgcttatgtacttgcctcggtctgagaaagggagtgactgcatagcccaacacctgtgggatgcctcactgcccagatgtttcatctccgggatgcttcattgcccattcagcaccctctatggtgctgactcttccggaagatgtttctgattccttgctaggctggtggttgcaccatagctgagaggactcaagaagagcctggtctcagcttcacctaggagtcccggaggagtaagaaacacgtatctttcctgttctgggcacatatgggtgggtagcagagctgaggctagctgaggatcccgactctcctttgggagcctttgttgtgccgctctcccaggctgatcagatctggagagctaacagcttcctgtggccacatctgtgtccaaggctgggcccatgcctgtagccagattgccaggatctggaaggggccaagagacagctggtgctgggtaggcagcagccctgtgtcaacctgcccccactattaccccatgctgtgatttgcatgtggtctgcccctgcccaaagtggtattgaaatttgagcctcaatgaggcggtgttaggaggtggtgcctagtaggaggagtttgggtaataggggtggatccctcatggataggttagtgtcctttgtggaggggtgagttcccatgagagctggttagagagtcagccttcctgcggttgtctcttgcttcctctctcgccatatggccacgtaatctctttgtgcatgcctctccccttctacttgctgccttgagttgaagtagcatgaggccctcaccaggtgcagctgcccaatcttgaaatttccaccagaattttgagccaaataaacctgttttgcttttttaaaaaaataaattcccccaccttggctgggcgcagtggctcacgcctgtaatcccagcactttgggaggccgaggcgggcggatcacgaggtcagatcgagaccatcttggctaacatggtgaaaccccatctctactgaaaaaaaaaaagaaacaaaaaaattagccaggtgtggtggcgggcacctgtagtcccagcccctcactcgggaggctgattgaggcaggagaatggtgtgaacctgggaggcggagcttgcagtgagcccagatcgcaccactgcactccagcctgggcgacagagcgagactccgtctctaaataaataaataaataaataaaacaaacccaacctcaggtatagcagtgtgaaacagactaagacattccacatgccctgtggtcccatctgctaccccagggtgcaaagatgttccctcagccctgaagaatgacattccccccggctcctgggatatctggaggggttgtaagcagcttgggttggtgagataaggagtttggggggcagctgattcatgaccctggcctcctcaactgcaggctcttggtctgaagtactgtaattgaagtatgagagcctcggggccctcacttcaaggagggaagagcatccccatgcctcagcgtttggggattgtagggagatgagagtccttcaggtgggactagttcccgccatgaccccactgctggccagtggcctgaaacgcatctgaccacttctcaggttcatgggtgttgaggaggagccctgtggaatcaaccctgtctgcctcctcttatcctgccactcctcttgctctgtctggatgactgcccttgtttttcaagggaatgttccctgtcttcctcagccaggattttttctgaacttgacatctccgtttgttcagggggcaatcactgggcacttcactgtgctggtccttgcattctcatggagatgcagagattaaaaattagtatcttgtccacatactgcccagagttagcaaggattgcttttctgtggatttgtctcaggtcgggcacagtgggggtagggtccttctcccttttcatagcctaaaggttccagctgaatcttcccaggcagggctgaaacaggaaccattttaggctttgctgcaacccatggtcagttctccaagaaaagtgaagagggttccacctggggcagccctcaagggctcagagggccaaaacacacgtacaacatgttgagacactgagtttgtgcgatcctcacacatctcagcagtgagtatttctgcctcattttaccgatgaggaacctgagcttcaaagggaagaggtgacagctcaggaccacacagctgtaggtaggaggcaggaaaatagggtctgagtgcagggaacataggctgattcacacttcagttatgataggaaataccttctccataggacataggccaagcaaatgactttgtaacttcatcctctccatctgcataacgtgtgccccaagtaaccaatggaatcacctagagggtgtttaaactctcagaagttctgtaacaggctctccatctacataacgtgtgccccaagtaaccaatggaatcacctagagggtatttaaactctcagaagttctgtaacagggcttttgtgctcctatgctcaggctcacccccacactgtggagtgtactttcattttcaataaatcccttcattccttctttgc

SEQ ID NO: 18670 - DNA, 2308 bp, Homo sapiens
tttaaaagggacagggtacagttttattggcttagagaaaaaaagcgggggcagggatgaggtgacagtcctcctcacctgaataattgcagctgaggattaaacatatctcttcccaaatactttatcttctaggtatacttctcttacaatttattagaaagctggttacttgagataactaaagagatactaattttcatgcaaacccatcacaatgtattgaaactgagatacttttctgctgctaacatatttaggaaaaatagttttatttttagtaaataaaatctccacttatttcaataaaaatggcaaggagaaaatgtcataagattatcctgccatgtaaaataagctgctccccaaaggactgtgtcaagattggttttaaatagaaaatatctattttaaatatatttagattataattgcctgggggttggcaaactttttctgtaaagggccagatactaaataccttaggctgtacgggccttcagatctctgtcacaactgttcacccgcgcggtgtagtgtgaaggcatccacagacaaaatgtaaacacacaggtgtggctgttctaataaaacctcaccaaacaggcagcacaggccacagtatgctgacctctgcactagcctcatctcaggttaactgtcctctagttattaaaaaagaaacccaaaattaagttacacaaaagtaatttttaaaaactactttggacgttaaaatggggccaaaggtagaatccacggaggtaaaagttcttgacgagcagtcaggaaatctgaatgattctgtcctttgttctgcccataaccagctgtgagctcttgggcaaatcacatattccctctgcgattccattattgcatctctaatctgaaaaagtagaggagggattccatccaattttgttactataaatttcagttcaagcaaacttactcccactgttaccaacaaaagtttcaaaagactcatttaaataatttataacatagttctggttaggcatgatgagctaaaaatgagagttggggtattaaaagcaaacaaaaaaagctgaaatatgaagactatccaaaaaacaacagcatcaaaaaccatgaaatacacagggatacagttaaaggatatataggatctctgcactgaaaaatgtaaaacactgctgagaaaaaatgaagtaaatggaaaaacatgtttatggattggatgactacttgacttatagattcagtgaatcctaataaaaatccacaaggcttcttctgggagtagtttggtggaaattgacaaaatttatttggaaatgcaaaggacctagaataaacaaagcagtttgcagaagaagaaattagaacgtctgttttacctgagatcaagacttaccaagttttgacaaaaagataaacagaatggaacaaaactagagccacagatatatggtcaaatgattttagacagggcaccaaaacagtttaacagtgaaaggagactctttgacaagtggtgctggaaccactgaacgttcagtagaatgttcaaaggtatttgatgcctacctactttatggcatataaaaatactaattcaaggtgaatcacagacctgaatattcgctacaactatcatactcctaagaaaaataagagtatcttcatgagcttgggtaggcaaagacttcttaaagagcacaaagaaagcattaactataaaacaaaaattcataaattggatttcaccaaaactaaacccttcttctcatcaacagatactactgagaacaggcaagctatagagtgggaaaagatatgtgacacataaatctgacaatcctttatgtccagaatgcacaaaggagtcctatccaattaaaaggaaaaaaggacatgaaaagtactgtccattagtcatcagggaaatgcaaactaaaccaccatgagataccgccacatatccagaagcatggctaaaatgcaacaggtggacaataccaattgtcggcaaggatgtaaaaaacaaccagagtacaatgtgctggcaggaacacaaaacagcacaatggttttagaaaactgttgggcagtttcttaaaaagttaaatatacagctaccataaaacctagcaattctactcctagctttttaatccaagagaaatgaaaacatgtccacaaaaatccctgtacaagaatatttatagcacatttataatagccccacagaaacagctcaggggtccatgaacagaaggatagctacataaactgtcatgcattcaaatagcacgacaac

SEQ ID NO: 18671 - DNA, 3198 bp, Homo sapiens
  CDS (640)..(1515)
agcatcgagtcggccttgttgacctactggataacgggaggagagcgccaggcggagctggggcgtccctcccgctcgcttcttgactcgcgttgctgccggcctcctcccgcgcctagtgtccgggacgcgcctgaacctgccgcctccgtgcctggggcggcgccgcgcggccccgagcgctccagaaagctgcggcgcgagtccgcggggccgacctcggagacgcagctggggccgggcgcggcttggcgggagggtctgcagcgccgagggaggctgccagtgcgtgaggaagagagctagagactggacaggggagacagagcagcgtcggagccgcgcaggggacgggagtgagagcgggagtgagagcaggaacgacgcagagcggccgtcctcaaggtgctgctgcttctccccactcagacttggagccccgtaggagcaggaaatccacctgactgtgatgctccactggcctctgccttgcctaggtcatccttcagcagctcctcagagctgtccagcagccacggcccggggttttcaaggcttaatcgaagagatggagctggtggctggaccccacttgtgtcaaataaataccaatggctgcaaattgaccttggagagagaatggaggtcactgctgtcgccacccaaggaggatatgggagctctgactgggtgaccagctacctcctgatgttcagtgatggtgggagaaactggaagcagtatcgccgagaagaaagcatctggggttttccaggaaacacaaacgcagacagtgtggtgcactacagactccagcctccctttgaagccaggttcctgcgctttctccctttagcctggaaccccaggggcaggattgggatgcggattgaagtgtacggatgtgcatataaatctgaggtggtttattttgatggacaaagtgctctgctgtatacacttgataaaaaacctttaaaaccactaagagatgttatttctttgaaatttaaagccatgcagagcaatggaattctacttcacagagaaggacaacatggaaatcacattactctggaattaattaaaggaaagcttgtcttttttcttaactcaggcaatgctaagctgccttccactattgctcctgtgaccctcaccctgggcagcctgctggatgaccagcactggcattccgtcctcatcgagctcctcgacacgcaggtcaacttcaccgtggacaaacacactcatcatttccaagcaaagggagattccagtaacttggatcttaattttgagatcagctttgggggaattccgacacccggaagatcgcgggcattcacacgtaaaagctttcatgggtgtttagaaaatctttattataatggagtggatgttaccgaattagccaagaaacacaaaccacagatcctcatgatggagttggctcatgggttgcaggaccaaaacctgaaaatatctctgactgtgtgtcaccagaccacacaatgaatacatcacttaggttagcatgagaaaaggggaaaaacagctgtgaagcccatgaactttccaagaaggtaaaggagaaaaaaaaaaaaagttgggtttgaagtctaagttttactatgaacagcaccctgctgagatcataaaaatgaaaaataccatcaagatacatgaaaaaggaaacaccaaagggaagagtgataacaaggctccacagagcgcagtttcctttgacaagatgaaaaagaaatgaaaagaggaaggagataaatggaacagccctctacctaaagtttctgcccatggagaaactgacatttaagtgctgctcaacaggaaaaagaaaaaagacctggttattgaagttggctttgttggagatgcgttactcagatacagatacaaagatgggtttggccaatgggcatccgtgtcaagaagcctgacctaacacgttctgaatattaagctaccttttatctgccagtccttggtgttcagaagaatccctcctcctcaccctaacttctatggggctatttccaaagacactgtcattgaagtgaggaagagtgagttgggccttatgacacaaagagacaagactatttgaggacaatagacacaggttttcatatacattccatgttattctgaattactgaggggttcactgatggaattattgagtatagccaataaggagaaccacagttaagctggtgtctctgggttctggacatcatcctcaagaaaactatttactaattacattgaatgaggttattaaaatgtgtaagtttcacacaaaaacaaaaagacaattcattccaaattgtgcatatggatatataatgttaattatgggaattccattttaagaattactacaattctatgtgttctgtataaaaacaggaaaatagttgttccaatatataaaaggaaaacatttaaaaatgtattttcttgggaaaatcagttgccagaattcattagtcaactaacaagcactcctctgtggcaagaagccctgcttctctgttgtagcaggcagctacccacctaaatgatgaggtcaagaaatatacagctgataaaaagataaaaaatatgtaatagtccagtgattacatgtgtactacggatcagcgccaattagttgtaagcttttggtatttagctcgttacagcaaatgttttcttttttaaattttcttctgcaaatgttttcttgtcatgaaaactgttttccatttagcagaattacaaaaatagtcaagaagaaatgttctgattgatgtatacagttagaatgtgtattaaagattattataaaatgataactgaattatatccatttctaaagtatgttgggacaaaattttttaaacatgtgattctgttttgaaaattgttttaccactggatcagtgtggttcttaaacttggctttatcttggagtcaccagaggagattcaaaagatacctttacctggctccacctccagagatcgggattttaaatggtctgtatctggattttaagagcccttctggtgattcgactgtttagctaggtttgagagccactaccctagatgagctgtcctgctccagtaacattctttttctaaaatcatttatagtatattagaaataaatccatggaaattccaagt

SEQ ID NO: 18672 - protein, 292 aa, Homo sapiens [sequence omitted]

SEQ ID NO: 18673 - DNA, 2174 bp, Homo sapiens
  CDS (366)..(1619)
ccccgccttctcgctgcccagccccggggagggaggcggggccgcgaccccggcgcgggtggggcgaatgcgttcccagcgggtagcctggggctggtgcagagttccaagcccacggccccggtcgcggcctcgccgccctcccgcgccccgcgccgggagcgggcctagagcgctcgcctcgcccctccgcgagcagggctctggcgcccgcccctgtccgcaccgctggcagcctgaagagagtcgctggccgtggtcgccgctaggtaggatatatctgcatcttgaaaggaagataaaacaaaagccttctttggaatagatggatttttgtcactttctgtgtgaactaaagtgattcaatgtctcttttggattgcttctgcacttcaagaacacaagttgaatcactcagacctgaaaaacagtctgaaaccagtatccatcaatacttggttgatgagccaaccctttcctggtcacgtccatccactagagccagtgaagtactatgttccaccaacgtttctcactatgagctccaagtagaaataggaagaggatttgacaacttgacttctgtccatcttgcacggcatactcccacaggaacactggtaactataaaaattacaaatctggaaaactgcaatgaagaacgcctgaaagctttacagaaagccgtgattctatcccactttttccggcatcccaatattacaacttattggacagttttcactgttggcagctggctttgggttatttctccatttatggcctatggttcagcaagtcaactcttgaggacctattttcctgaaggaatgagtgaaactttaataagaaacattctctttggagccgtgagagggttgaactatctgcaccaaaatggctgtattcacaggagtattaaagccagccatatcctcatttctggtgatggcctagtgaccctctctggcctgtcccatctgcatagtttggttaagcatggacagaggcatagggctgtgtatgatttcccacagttcagcacatcagtgcagccgtggctgagtccagaactactgagacaggatttacatgggtataatgtgaagtcagatatttacagtgttgggattacagcatgtgaattagccagtgggcaggtgcctttccaggacatgcatagaactcagatgctgttacagaaactgaaaggtcctccttatagcccattggatatcagtattttccctcaatcagaatccagaatgaaaaattcccagtcaggtgtagactctgggattggagaaagtgtgcttgtctccagtggaactcacacagtaaatagtgaccgattacacacaccatcctcaaaaactttctctcctgccttctttagcttggtacagctctgtttgcaacaagatcctgagaaaaggccatcagcaagcagtttattgtcccatgttttcttcaaacagatgaaagaagaaagccaggattcaatactttcactgttgcctcctgcttataacaagccatcaatatcattgcctccagtgttaccttggactgagccagaatgtgattttcctgatgaaaaagactcatactgggaattctagggctgccaaatcattttatgtcctatatacttgacactttctccttgctgctttttcttctgtatttctaggtacaaataccagaattatacttgaaaatacagttggtgcactggagaatctattatttaaaaccactctgttcaaaggggcaccagtttgtagtccctctgtttcgcacagagtactatgacaaggaaacatcagaattactaatctagctagtgtcatttattctggaatttttttctaagctgtgactaactctttttatctctcaatataatttttgagccagttaatttttttcagtattttgctgtcccttgggaatgggccctcagaggacagtgcttccaagtacatcttctcccagattctctggcctttttaatgagctattgttaaaccaacaggctagtttatcttacatcagacccttttctggtagagggaaaatgtttgtgctttccctttttcttctgttaatacttatggtaacacctaactgagcctcactcacattaaatgattcacttgaaatatatacag

SEQ ID NO: 18674 - protein, 418 aa, Homo sapiens
MSLLDCFCTSRTQVESLRPEKQSETSIHQYLVDEPTLSWSRPSTRASEVLCSTNVSHYELQVEIGRGFDNLTSVHLARHTPTGTLVTIKITNLENCNEERLKALQKAVILSHFFRHPNITTYWTVFTVGSWLWVISPFMAYGSASQLLRTYFPEGMSETLIRNILFGAVRGLNYLHQNGCIHRSIKASHILISGDGLVTLSGLSHLHSLVKHGQRHRAVYDFPQFSTSVQPWLSPELLRQDLHGYNVKSDIYSVGITACELASGQVPFQDMHRTQMLLQKLKGPPYSPLDISIFPQSESRMKNSQSGVDSGIGESVLVSSGTHTVNSDRLHTPSSKTFSPAFFSLVQLCLQQDPEKRPSASSLLSHVFFKQMKEESQDSILSLLPPAYNKPSISLPPVLPWTEPECDFPDEKDSYWEF

SEQ ID NO: 18675 - DNA, 2834 bp, Homo sapiens
  CDS (129)..(2180)
gcagaggcctgcgggaagccaagatggcgcataggggttctccaggctgcagttggcgccttatcagtatctaagcggagtgttttggaaggagttaaggggctgtggcaaacgccctctccgccgtcatggcccggcatcggaatgttcgaggctataactacgatgaagattttgaagatgatgatctctacggccagtctgtagaggatgattattgtatttcgccgtcaacagctgcccagtttatttattcacggcgtgacaaaccttccgttgagcctgtggaagaatatgattatgaagatctgaaagaatcttccaattctgtttcaaaccatcagctcagtggatttgatcaagctcgtctttattcatgccttgatcacatgagagaggtacttggagatgctgtgccagatgaaatattaattgaagcagttctgaagaacaagtttgatgtgcagaaggctttgtcaggggttctggaacaagatagagtgcagagtttgaaggacaagaatgaggcaacagtatctacaggaaagatagcaaaaggaaaaccagtagattcccagacatcgcgaagtgaatctgaaattgtgccaaaagttgctaaaatgactgtatctggaaagaagcaaactatgggatttgaagtgcctggagtgtcttctgaagaaaatggtcatagtttccacacacctcaaaaaggaccgcccattgaagatgccattgcttcttccgatgttcttgagactgcttctaaatctgctaatccaccccacacgattcaagcatcagaagagcagagttcaaccccagcaccggtgaaaaagtctggcaagctgaggcagcaaatagatgtgaaggcggaactggagaagcggcaaggagggaagcagctactcaacttagtggtcattggtcatgttgatgctgggaaaagtactctgatgggccatatgctttatcttctgggtaatataaacaaaagaactatgcataagtatgaacaggagtctaaaaaggctggcaaagcttcgtttgcatatgcatgggtcttggatgaaactggcgaagaaagggaaaggggagtaaccacggatgttggtatgacaaagtttgaaaccacaaccaaagttattacattaatggatgctccaggccataaggacttcattccaaatatgattacaggagcagcccaggcggatgtagctgttttagttgtagatgccagcaggggagagtttgaagctggatttgagactggaggacaaacacgagagcatggactcttggtccgttctctgggagtgacgcagcttgcagttgcagttaataaaatggatcaggttaattggcaacaagaaaggtttcaagagattactggaaaacttgggcactttcttaagcaagcaggttttaaggagagtgatgtaggttttattcctacaagtggtctcagtggtgaaaatctaatcacaagatctcagtcaagtgaactcacaaaatggtataaaggactatgtttattagaacaaattgattcctttaagcctccccagcgatctattgacaaaccttttagattatgtgtgtccgatgttttcaaagatcaaggatctggattttgcataactggtaaaatagaagctggttatatccaaactggtgaccgactactggcaatgcctcctaatgaaacttgtaccgtgaaaggaatcactctgcatgatgaacctgtcgactgggcggcagcaggcgatcatgttagtcttactttggttgggatggatatcatcaaaatcaatgttggctgcatattttgtggccccaaagtacccattaaagcttgcactcgtttcagagcccgaatcctcatctttaatattgaaattcctatcactaaaggatttcctgtgctgttacactaccaaactgtcagtgaacccgccgttattaaacgattgattagtgtcttaaacaaaagcacgggtgaagtcacaaagaaaaagcctaagtttttgactaaaggccagaatgcattggtagagctacagacacaaagaccaatagctcttgagctatataaagactttaaagagctggggaggttcatgctacgttacggtggttctacaatagctgctggtgttgtcactgagataaaagaatgatgggtcagaatttctaccacgtttctggatacagtgaaatagctaacctctgtttcaagaatgcagttattaagtcaaaggaacaatgtgcaattgatatgtttttagatgagagagaaaaattaaagctaaaattagctgcaaagaagtattaataatcacctctgcaaaaattctaagttgccagctggcaaagaaagtctaatgttaaaaacaactttgcctttgaaacgttaataaatggatttactttgctaagatttatggcaagtgtcaaaaatagtatctgaagatactgaatcatcatgaaatgaactctacttctggccaaagcacaatgtatttgcagttttctcttttgattcaattatactgcacatgttttaaggaaaagtaacttaattgggtttttcaggcagttgatatttgacctaagctttttttttttttttttttccagttaatgctaagaaaagatttggggaaggttataataaaagtattttgtggtgaccataagaatgtccctccccaaacaagtaaacttgtgaaagtttaatttggaattagtggaagctgttcctttgaaagccaagatattatttaagttgtaaagccagctaataaaatgccttagtttgagcataatac

SEQ ID NO: 18676 - protein, 684 aa, Homo sapiens [sequence omitted]

SEQ ID NO: 18677 - DNA, 3626 bp, Homo sapiens
  CDS (157)..(2046)
ttgggcgcttcgctgatggtgtcggtgagcgcgtttcccgcctgagcgcaactagcggcgggtcgtgggcacctccaggctcagacgtgcagcttctggaatacgaggcgtcagctgctggcctcatccgatccttctctgagcgtttcccagaggatggacccgagttggaggagatcctcacacagctggccacagccgatgcccgattctggaagggccccagtgaggccccatctggccaagcttgaggaagatgtgtggccttgcccccaattccatcagaccaaggctgcaagtggccctccattcgtcaatgaggccaattcgaagtggttggatgcgcactacgacccaatggccaatatccacaccttttctgcctgcctagcgctggcagatttacatggggatggggaatacaagctggtggtaggggaccttggccctggtgggcagcagccccgcctgaaggtgctcaaaggaccactggtgatgaccgaaagcccgctacctgctctgccagctgctgctgccaccttcctcatggagcaacatgagccccggaccccagctctggcacttgcttcaggcccttgtgtctatgtgtataagaatctcagaccctacttcaagttcagcctgccccaattgcctccaaatcctctggaacaagacctttggaaccaggccaaagaggaccgaatcgaccccttaaccctgaaggagatgctggagagcatccgggagacggcagaggagcctttgtccatccagtcactcaggtttctgcagctggagctaagtgaaatggaggcatttgtaaaccaacacaagtccaactccatcaagcggcagacagtcatcaccaccatgaccaccttgaagaagaacctggctgacgaggatgctgtgtcttgcctggtgctgggcaccgagaacaaggagctcctggtgcttgaccccgaggccttcaccattttagccaagatgagccttcccagcgtccccgtcttcctagaggtttctggccagtttgatgttgagttccggcttgccgcggcctgccgcaatggaaacatctatattctgagaagagactccaagcaccccaagtactgcatcgagctgagcgcccagcctgtgggacttatccgggtacacaaggtcctagtggtgggcagcacccaagacagcctgcatggcttcacccacaaggggaagaagctgtggacagtgcagatgcccgcagccatcctgaccatgaacctcctggagcagcattcccggggcctgcaggccgtcatggctgggctggccaatggagaggtccgcatttatcgtgacaaggccctgctcaatgtcatccacaccccggatgcagtgaccagcctttgctttggccggtacgggcgggaggacaacaccctcatcatgaccactcgaggtggtggcctgatcatcaagatcctgaagcgtacagcagtgtttgtagagggaggaagtgaggtgggtcccccaccagcccaggccatgaaactcaatgtgccccgaaagacccggctttacgtggatcagacactgcgagagcgggaggctggcaccgccatgcaccgggccttccagacagacctatacctgctgcgcctacgtgctgcccgcgcctacctgcaggccctcgagtccagcctgagccccctgtccacgacagcccgagagccactcaagctgcacgccgtggttcagggccttggccccacctttaagctcacacttcacctgcagaacacctcaacaacccgtcctgtcctggggctgctggtctgcttcctgtacaacgaggcgctctattccctgccccgggccttcttcaaggtacccttgctggtgccagggctcaactaccccctggagacctttgtggagagtctcagtaacaagggcatctcagacatcatcaaggtgctggtgcttcgagaaggccaaagtgcacccctgctgagtgcccacgtcaacatgcctgggagcgaggggctggcggccgcctgagacctgagctgctgtgaaagcccctgcacaatcagccagggagaactgggcgggtttagtggccccaggcccactcctcatgcagcagtgtgctggggcgacagctcgtctcccctctcttaagcacccgcttcctcaccacccccactgttgggcctatagtagcaggttagtgagtacctagggcggctcaactcctcccacagcaccaacccagcatggtcccactgaagtcctactacgccctcccctccccagccttttccagaaaccatactgggctcagatcagagctccgaagcggtcaaagtgagctgagcaggacaggcccagcctttctccactgccacgtccctcatgcacatcactcatctcctgctgcaggccaaggccaaaattgggctagtcctggccagggaaatcagaagctcttcttgggtgagattgagcctcctgttgctccctggagttccggaggctgggctgcagcccactcagcttgcgggcaaaatacgtgctctcctctctccttgtcagctgagcaaacccagggaatagccctcctctccccaggaaacttctctgaaatcttagacttagccagtcttaggcctacgatgccacacaaaggttgttcagggagaagggggtgcaggaggcagagggtgccccgcagggagctggtggctccagccccactagagctcctaaagatcacacagcagctgctcctgacagggatgctcatgcccagaaagcaagcccaggagaggaaggcagagtgtgacagagcagagccagggccaggcgcaccaggagaggcgtttctggggctccagagaagtgccacgggaggcagaagtccagaactgcccatatagatgcccttctacatcctggagcccaaatcagtcatgtgggtgggaagttcccagggcagtggtcacatcgtgaaaattagcaggaaaggcggggcctttcttgtcatagctatttctgaggatgaaatgggagacatatgcccagcacctgatgtaagtttatataatgtaatattatgtacctaccactaagaaatacatgaaccgtgccatgaggacagtaagtgttcataaagcaacatgaagcaagaaacagtgcagggtgcccagtgcacacactagagagaaattgtgaacattaaggacaaggagaattggtgtctttctaaaacatacttattttaaaaacacatacccacttactaatgtggaattacacagtttgtaacaagaaaacagtctctcccattctctagtactgctcccctacccagcagtcacttccagttcattcagctatttttaaaatgtgcttatatgactcttgcttgatatatcaatcttagacattacctgttgactccctgttgtcatacatgaggctttagctctcttttgtcagcaaccctcccccatccctagttattaggttaaaaaatactcagattactatttctattactatgtgaaagttaactgcggagccaagagttggactataattaaattaccttccttgtactttctttttaatgg

SEQ ID NO: 18678 - protein, 630 aa, Homo sapiens
MDPSWRRSSHSWPQPMPDSGRAPVRPHLAKLEEDVWPCPQFHQTKAASGPPFVNEANSKWLDAHYDPMANIHTFSACLALADLHGDGEYKLVVGDLGPGGQQPRLKVLKGPLVMTESPLPALPAAAATFLMEQHEPRTPALALASGPCVYVYKNLRPYFKFSLPQLPPNPLEQDLWNQAKEDRIDPLTLKEMLESIRETAEEPLSIQSLRFLQLELSEMEAFVNQHKSNSIKRQTVITTMTTLKKNLADEDAVSCLVLGTENKELLVLDPEAFTILAKMSLPSVPVFLEVSGQFDVEFRLAAACRNGNIYILRRDSKHPKYCIELSAQPVGLIRVHKVLVVGSTQDSLHGFTHKGKKLWTVQMPAAILTMNLLEQHSRGLQAVMAGLANGEVRIYRDKALLNVIHTPDAVTSLCFGRYGREDNTLIMTTRGGGLIIKILKRTAVFVEGGSEVGPPPAQAMKLNVPRKTRLYVDQTLREREAGTAMHRAFQTDLYLLRLRAARAYLQALESSLSPLSTTAREPLKLHAVVQGLGPTFKLTLHLQNTSTTRPVLGLLVCFLYNEALYSLPRAFFKVPLLVPGLNYPLETFVESLSNKGISDIIKVLVLREGQSAPLLSAHVNMPGSEGLAAA

SEQ ID NO: 18679 - DNA, 4004 bp, Homo sapiens
  CDS (24)..(740)
gtcaagaggatcatccatgcatcatgtggactggaggctgcaggagaattccagttttggtattccatgccgacgctattcttacaaaggacaacaatattagagtaattggagaacgttatcatttgtcttataagattgtacgaacggacagtcgcctagtacgcagcattctgacagcccatggatttcatgaagttcacccaagcagcactgactataacctaatgtggacaggatcccacctgaagcccttcttactgcgcaccctctctgaagcacaaaaagttaatcactttcccaggtcttatgaacttacccggaaggaccgactgtacaaaaacattattcgaatgcagcatacacatggattcaaggcttttcacatcctcccccagaccttcctcctgccagctgagtacgcggaattttgtaattcatattcgaaggaccggggaccttggatagtaaaaccagtggcatcttcaagggggcggggcgtctacctgatcaacaatccaaaccagatctccctggaagagaacattttggtctcccgttacattaacaaccccctgctcatagatgatttcaagtttgacgtgcgcctctatgtgctcgtgacttcctatgatcctcttgtcatctatctctatgaagaaggattggctagaaaatgcaattggaagatgggaaataccatggataaaagaaggctacctatttatgtacaggtgctttgacagatattattgtactctgacaactattattttagaatggtcttttaatgattttagagacttagtttttttcacatgtatcctatgacttgaaatcagtgagagcagactaaccaaacctcgctggtggagctctgtgttccgttcgcctctaggtggcagtcacagcatttataagtcctgtcatattcttaactgagattttgagtttgagccctgggaacattggagactaccaaaactccctagttctggcctcttccttgaaaattgagaaagggaagaactgaaacatctcgcagttattagataaagggctggaccaggcatctgaacatgagctgactactagctctaatcaggtttttataggaaagaaattgtcgataatatttgtagacacacgtgctctcacgttttgaagtatcactatacaaaattaggtataaaagcctattcctggccaggcgtggtggctcacacctgtaatcctagcactttgggaggccgagacgggaggattgcctgaggccaggagttcaagaccagtttgggcaacattgtgagaccccatctcattaaaaaaaaaaaaaaaaaaaaaaaaaaagaccaagaaaaagcctattccctatattatttaaaacaaaatgatggtaaaatacagtcctgacttctcagatatgcaaggttctgaggattttcagctttataatttgagacttctgagctttctctcttttgtgttatgagattcatcattctccttcctctgctcatcctcaccttcacttctctcctgtgtcaagttttagaaactgattatgtcctgccaaaaattggactttgggaatagagaaaagagatggaggttgtgcttcactgtttctcaaggacatcatagcaatatgttttgcttaatattccaaagatattttcacctacaatattaacagccctctctatgggtaaaatttggcataattttaagacctttctggttcagagcacaacatgagaacaacagtaccaatgtttattatagaatttactacaaatatgcaagtgctttggctactggttgtgtgttggaagtcagaatctactgaattaagtataacccttttgcttccagcagaaacaaaaaaatttatacacacacacacacacacacacacacacacacacacacacacacacaatggatgttttttcacagaataattagaaaaacagcttttaaaaaactcagaccaagtagaaccagaaagccacatgaattttcagggctttggttaggtttacctgaaagtgtaggtgaatataaaagctttatcaaagctttacaaaagcataacgcatggcaatatgatgcactgtttgcgggagtcctgcgagggcacattgttccgtgcagtaatttcaatgtgcctaagttcttgtgtcttcactaattatgtatcttgacattcacttgctttgttgtaaccctcagagtctgttcaactatgtcgatagtctgtagcatctccagatctgcagcttttagttatcttgggccacatgtaatttatgtagacataactgaagatcatcagtttgggatgagattattgggttacgttgaggctcaacaagaaaaaccataatctttcctaaagagacggaacaggaggcaaatacaattcatttccttctttagaaatgaattcccttacaccctatcacttctgttttggacctcaaattaatactaggcgacagaaagattaaattcatttcacaagacagttttgtgatataagttattttgtgtaaaattttttaacacaaaattaaattcgtgaaaaccctagtttctgtatagatgagtgttttcagttgtccttattgttttattaacataagaagtgggagagctctcactgttttctcatgtgtgggtatagtattgaagaagtgttgcaattgtccccctggtatttgggtgcagctttttgtgattcccacagtagccctcagaggtcccctgtgcttttgaattttacttgcgtgttgctgttttgcaccaccaggggacactcagtttccacagaggggtgctatgctctaccaaaatggtgcagattctttttcctgtcaggggtggactccaaaaagatttcgtcctggattttacagctttaggtggatccagtattgggtttagatgagttgacagagccctttctgagatgaagctaatagccagattttcactgaaacaggaaaaataaaaatttcaaaaaaattaaaacaaaatggagttaaaaactaaatatgttgccagagacccaaagataggcagctctagcaacttggggggcatgcaagtatccatccagggagctgagttccacccatgcggcggaggtgggaagagaggattctgggaaggtcccggttggaatggccttttttctgcctcagccatattattcagtggaaattcagaaaagaccccaaaacatttgtagtgcctttccctttctccccacccccagttccttcttcagtagccttccttgctaattaacactggctctgcagggatatttaccttttctctgctggattcctgtggttttgaaagaattcaggtacttgctggttgccaaggaattcagattacctcacaggctgcacactgtccagaatctgccacagcagcaagtaggggggaagagacaccaacaagggggagaaaaccctttccagtgctcattgtcaccctccctggcaggcccttgctgtttgtgaagtttgagtcatttctggctctaaagacaagggatcaggctggtaatcccctcccagacggctctgtagggcgctgcctagtcactgcagcgctttggcagtctcccggctgcagctggttgacagcagatcagagagctcttgggcctcttgttctcttccataagatttttctgggtcaggccaggatgaaacccagtggctcctggcaaggctgcctgaggtgctgtctcttcattgtccaggcctctctgactcaaaatgcctacacctgttgaaggataactcatgtgccacagcgaggtcgaggctggccttctcttttcttggtacatttgtagtgaatgtttgtcagaaaatataactaccaaagaggatgttaagcttctacatctagaatgcctgtgactctgaccataagaagatattggtatcaaaaaaaagtttttaagaaaacagcaggac

SEQ ID NO: 18680 - protein, 239 aa, Homo sapiens
MWTGGCRRIPVLVFHADAILTKDNNIRVIGERYHLSYKIVRTDSRLVRSILTAHGFHEVHPSSTDYNLMWTGSHLKPFLLRTLSEAQKVNHFPRSYELTRKDRLYKNIIRMQHTHGFKAFHILPQTFLLPAEYAEFCNSYSKDRGPWIVKPVASSRGRGVYLINNPNQISLEENILVSRYINNPLLIDDFKFDVRLYVLVTSYDPLVIYLYEEGLARKCNWKMGNTMDKRRLPIYVQVL

SEQ ID NO: 18681 - DNA, 2377 bp, Homo sapiens
  CDS (532)..(909)
aatgctgcccgatggccctgggtcctcgctgtggggcaatccgggcttgcagacgagttttagaaagagcgttttcgctacgtaaagcacattcgataaaggatatggaaaatactttgcagctggtgagaaatatcatacctcctctgtcttccacaaagcacaaagggcaagatggaagaataggcgtagttggaggctgtcaggagtacactggagccccatattttgcagcaatctcagctctcaaagtgtgacagccccaatgctgttcatgaggtggagaagtggctgccccggctgcatgctcttgtcgtaggacctggcttgggtagagatgatgcgcttctcagaaatgtccagggcattttggaagtgtcaaaggccagggacatccctgttgtcatcgacgcggatggcctgtggctggtcgctcagcagccggccctcatccatggctaccggaaggctgtgctcactcccaaccacgtggagttcagcagactgtatgacgctgtgctcagaggccctatggacagcgatgacagccatggatctgtgctaagactcagccaagccctgggcaacgtgacggtggtccagaaaggagagcgcgacatcctccccaacggccagcaggtgcttgtgtgcagccaggaaggcagcagccgcaggtgtggagggcaaggggacctcctgtcgggctccctgggcgtcctggtacactgggcgctccttgctggaccacagaaaacaaatgggtccagccctctcctggtggccgcgtttggcgcctgctctctcaccaggcagtgcaaccaccaagccttccagaagcacggtcgctccaccaccacctccgacatgatcgccgaggtgggggccgccttcagcaagctctttgaaacctgagcccgcgcagaccagaagtaaacaggcaccttggacgggggagagcgtgtgtgtgatgggaaaatccggacccacgcgtgtgctgaaggcgtacggtgcttgccagattttcaacttgagcataaattggttgccattgagaatttaagaatctggaatattgcagcttttggttaaacttaatgcatggttggagatgttatggcgacactaaacaaagtattcctgaactttccttagctccttggtagtaactgggaagacagaaatgaagaaaatcacatgagaatgaagaattctttagcagctcaacagagtttctcggcctgctcccagatcggcgaagtttctacttgttactctctctgccggcgcccttcgttcctcctctgcttcccttccctagtctttcctccggcagggagctgggcaggggtccccgggtgtctccctgagtcccgactgcactgactgggtccatcagagggctgcttcgttctccagctcatcttcttttaaagtggtgactagcttggtggtatctggctgctggtgtttggcttattgacatactccagggtaatcaatgatgactttgtttggaaacccttttggaggcaccatgggaacagaaggaaacatgagtgacgctgacccttgagtgtgtgggtggggagctctgagacgcctcctgtcccacgctctccggtgtccgtgtctacacaggggtccccatgatacccaccggccccagcagggcagaccggaccggggacgggcacggtgaagggctgcagcctggggtctgacgtggcccctagtgctgtctcaggagaaggctctggaggacttgaggcatgctgggcctggtgcagtgatggcgctaaggagacccggggaaagacagtatcgtggtcacgtatgcttaggaagcagcacagccgtgtccttagggatgttcgcgtccagtaaagacactggtaactgcggtttcagccaacactcttcatggcagtgtcgacctcgggttagcttctgttgtctttgtggatggttttcctggagcggcctgacgttgacgtgttctctggtcccatgtcttagcggggcatggtacggtttcgtgcctgacgcgtgcattagggtgttctcttatactttcagtagcatctttccacagcaagggccaaaccctcctggttcccttcagagtctttttggcctgatgatgactcttgagtgataccctgtgatgcagacatgccccagatggattctactttctttaaaactagggactttcaagattaaaaaaaagattgtcactactaatttgacgcctaacttcagaagcttcactgtctacatgtgaacttttccagaaaaactgtgccatggacatttttcctctggggaattaacatctaaattctggtaactattaaaagacagatctggttaattt

SEQ ID NO: 18682 - protein, 126 aa, Homo sapiens [sequence omitted]

SEQ ID NO: 18683 - DNA, 3071 bp, Homo sapiens
cttcatggacacccacacagattcactggagagcaaagcctaccagagtccctgtcagcagcactgtttctagaagcttccacatgagcagacagcatggagtcctgggggctaatgaagcagcaatgtcagcatgagcacaggcagggagaggcaagaggagcagagtaaaggggaacgttctcttcattcttccacctgcctgtcccccagccgacacgtcccttccgttccctgcaaggccatttccagggaggcttacgaagacagcagatgatggtgatggaaggagtctgggtgctgagctgtgccatggacctggagagaaactgagtccgagggatgtcaacatgccaagtccatggaaatatcagtgggctggaattctagctgcctgaaagaagacattcctcacacaagacctcacaatcatatccatggaattatagcactgggctctccagatggtgctacaggaagacctccagaaatttgacgatcctctattcaaggccctaccacagagacacacaggaacggaactcagaatcacaaacaaagaaactttgatccaagaaagaaaatgatctttaaaaagaccctcgtttcatgctggccgatgctgagaaaatctgctctgaaggatatttggagacactgattaaaaggtagtaccatcaccacatatttaacttccccctctttttcctctgcttctaggagtagagaaaccaacaaaaccaaccggagagagatggtttcaaacaatctgtcccccaccccaccactattcacacctttcacaagggcccagccacaaagccagtgcaacatgacatcaatcatcagcaaagtggagatggttgtcccagtggagggggattcttcgtgttacgtagataggaagcacgatgcaaaagtgttgaagcaggagtgtaaagaataattaaaacacctgcccaagacccaagcaaggataggatttcccagacattcgcgagggagaaaatgccatgtcctttccttctggtgtcacatcagaatctgaaggctgctagagaagggagagaaacatgaaagtgagtcccatgctgattgttgttgaaatacctggaaagaaactggcaaagactatccaagggatgctaagacatgtctgaacttacaaaacagtagaacctgaataggaatttgaagttgtctatactctcctcagccacaccctgccattttacagattgtcttctctggggaagttagctgtcatgttgtgaggatactcaagcagtttataaagaggttcatgtcgcaaggaatggaggcctcctgccaacagccatgtaaaggagccatctaggaaatagattctccagccccagtcagaccttcagatgattacagcccctaccaaccttctgactgcggtggaaggaaggttccggaaccagaaccacccaggttaatgtgggtaagcctcatccaatcctttgaaggcctgaagaacaaagagtgaggtttctggaagaagaaaattttacctcaagcctgcaatgtagaaattctgcttgagtttcccgcctgctggcctgccctgtggaattcggagtcaagaaggagtcttgtaagcattaactgagatagtatatgaagagtgcttttgcaccgagtgaaccttcaatcaactgtactagtttgtatgcctggaagagctgctatatgggatcagaaagaaaaataaggtgcatacgccagaaaaaaatacttgcatatgagtactaggagatgcatgacaatgttcacggcagcagtattcatggcagtgaaaaatgaaaagaactgaaatgcccattgataaaaacgtctacttatttgtgtcatctttgcacagtggaattgtgcgagtggaaatgattgatctacagctaggagaagcagcagagctcaatctcaaaaacataacgttgtgtggaaaaagctaacctcagaacactttgcggctctatcttagcaaaccaggagagaaattctcctgatggccttgaagaagcaaacagccacctggttaagcccctgtggatagtgccaagtggctggaaagtgggagccacctctaggacctgaggattaaagtcagtaagagctgggacctcactcatgcagactcgaggacatgaattcgaccaacaacttgaatgagcttggaagtggattcttccctagtccagtcttcagaaattaagaatgttcccaaagaatgatggagacatttcaaaaggatacggaagccagattgtgggcgcttctactggccaactctgggacatcgtggacatcaaaataaatttgtaataataaaggattatagcctattagttaaatcagaaaaatctgatttaactaaatgagtaggaggaaaagaaagctcttccttatattagaaagtcaattaataaatgcagaaaggaatgaaaaaattagaaaagccaccatttggcaaccatggcaggcagaatggggagtatgcctccagacagtaattcctttcaaactggtttataggaactcactgagcttgctgatcgacctctgagaggcaaagtttctgaattatgaagtactgattatataaacttagacagagacatgcttcattatttaataggactgtgtcaaaagcctactattaggatgatgtgttgggtgtggaacagggtctcttcctgccaggaacactggtgatttcactccgtgttcaggctgatctttgaagttgaagacaagcagaagaatccttctaaaatttagccatgcccataggctgggagggacactgctccattcagaggcagcaaagcacattactgtatctcctatagagctttgagcagtccagtgtacatggagaaacttagtaaatgttgttgaattaatgaatgaacaaatcaatggaccaagtcaggggtaagtcttacatttgtcatctaggtgattaagaaaggaaaaagtatctgtttcaagaggattacaatctaactgtactccaatagtaaaatttactcttttggaatctg

SEQ ID NO: 18684 - DNA, 3093 bp, Homo sapiens
ttactggatatcaagatgactaagaaatagcacttgccttgaaggagcttttctatttgaggaaaaagacatgtatataaataactgcaaacagaatgaaacaagtgttatgtagatctacatacagtgacatgccatgggaatgctgaacactgagcaacagtttcaactagcgaattggcacaggaaacatgaaaaataagcgtattttcaatatgacaagaatggtcatttctggatataagaacaagagagaagtcatgggtatatggaaaggcatggactcttcaaggaagagcaagtagtctaatgtagatgctgtataggaatctggggacaaagggacagataagtggtgtagacaaagaggctggaaatagggttatgggctagatcatgagtgacctgtaagcattaggagttttgatttattttggaataagaaacatttatggcttttgagaaggaaaattacacaagggaaaagaaaggatttttattttttatttttatttttggagagatgagatctcactatgttgcccaggctggtcttgaactcctgaactcaagcaatcctcccggctcggcctctgaaacttctaggattataggcgtgagccactacgcccagccaggattatgtttttttatgggagggatgagaatattggtaggtgggtagaggataaatgagagagaatatgtatatgtgagattgaatatataatagaaaaaattgataggacaagtcctgcgttattactacattttatgaggaaaatctatatattagaagcactttaaaggtatatttgctattctagctgtggaaaccatctgaaaacacatttgaaagtgctttgaaacaggggtcaacaaacttctctgcaaagggccagagtatgtttagctttgcgggccacagatggcctctgttgcatatgctgctgggtctccaccttcctcctccttttcttcccttcctcttccttctttttcttcttctctttcttctttctctttaaaagcataaaatcattctcagctcttgggccatacagaaacaggccataggccagatttgacttctaggccatagtttgccgaccctccattttagaacttagctttcctgaaagagcatttgggtctctctctctctttccctttctctctctctgtctctctctctctctctttcagtaagtgaagtaagaaataggtctttcttgaggaacaaaaagctgaaataatttcatgcatttgaatatgacccttgacctgtttttgtccatcatcactcagatttgtggctgcaaccaccaaccaatttggtgccataggatatagcataatttttcagcaacagttcataagcttttctttttgttctttttccttcttccagttgtggtggtttaaaaacatgtctgcaaaatctttgacacttctcagtaaaaaatatagtcttgtgttcccttttcttgaacctaagtggcctttgtgctgcctcaacaaatagaatatgacagaaaagacactatgtgacttttgagacagggtcataagaggtgatacagcttccccatgcccctgcattttagagctctgggttgccatgtaagaatagctaccctgaagctaccatgctgaagagaccacagggaaatcacatagagttagaaagaggtgtctgaagaagcccagctgctcccaatcccagctatttaagtcctcccagaccaggtgccatatatatgagtgagcaagccttcagatggttccagcaccagccaccatctagctgtaagctcatgagaccccttcaacgaaaaccatctagattagcttagtcaagccccagaaccgtgaaagacaatagacttgctatggaggtcgccacatgcctcttttttctccctttgtgaatgggattatttataatggttaccccatacctactccactatgtatattgggtatgagggagagataatttgtctcactagctgacagatttttcagacctcaaggaatgccacgtgagctgtactcacaggaccacacacaagtatctttatccacacgtgacctgatttcactgataaagtcctggaccttgagcctgagcccaatgtcttaataaatgagaatttcagaaggtcttgggagggggtgagtatattttgcatgtgggaaggatgtaaataatatgtggcctgagagcagattatggtggtttgaaaatgtgtccaccaattctttaatactactctcaacaagaggtggaatctgtgtctcttcctttggaacatgagtggacctttgtgattaaatgcagcagaaggatgctgtgtgaactctgagacagggtaataaggggtgatacagctgccacctagttctttctcagaacatgtgcctttggagccctgagctgccatggaagaaaaccacctaccctgaagccacaacactggaaagaccatgtggaagaaccacagagagagagaagaggaccaaatgtgtgagccttcccagcccaggctccaaatatgcaagtagtaagccttcatttctttttggttttaatttttttttttaaataaatcgaaatgggttctcactatgttgcccaggctggtcttgaactcctaagctcaagtaatcctcctacctcagtctcccaaagtgctggaattgtaggcatgagccaccatgcctggctgcaattagtaagtcttcagatgcttccatcaccagccaccatccgatgacaaccccatgaatgaccctcagcaagaactacctagctgaatccagccaaactccagacccatgagagagaaataaaattgttgtttgagtcactaaatacggagtaatttatattatcaacagataactggaaccacaagtgtaattgttaaaggtaaaactttgaatacatttatatttgccttctgccacattccataattgacttttgttcatgaacctattggcaagtttgccttattgcttttccttcttccctcttttttttttttgtaacttaaaaaatcatataataaaacaacacaaaaatgt

SEQ ID NO: 18685 - DNA, 2604 bp, Homo sapiens
  CDS (46)..(1224)
agcgattctcctgcctcagccttccgagtagctgggattacaggcatgcaccaacacgctcagtgtttaactgctgaagagatcttttcccttcatggcttttcaaatgctacccaaataaccagctccaaattctctgtcatctgtccagcagtcttacagcaattgaactttcacccatgtgaggatcggcccaagcacaaaacaagaccaagtcattcagaagtttggggatatggattcctgtcagtgacgattattaatctggcatctctcctcggattgattttgactccactgataaagaaatcttatttcccaaagattttgaccttttttgtggggctggctattgggactcttttttcaaatgcaattttccaacttattccagaggcatttggatttgatcccaaagtcgacagttatgttgagaaggcagttgctgtgtttggtggattttacctacttttcttttttgaaagaatgctaaagatgttattaaagacatatggtcagaatggtcatacccactttggaaatgataactttggtcctcaagaagaaactcatcaacctaaagcattacctgccatcaatggtgtgacatgctatgcaaatcctgctgtcacagaagctaatggacatatccattttgataatgtcagtgtggtatctctacaggatggaaaaaaagagccaagttcatgtacctgtttgaaggggcccaaactgtcagaaatagggacgattgcctggatgataacgctctgcgatgccctccacaatttcatcgatggcctggcgattggggcttcctgcaccttgtctctccttcagggactcagtacttccatagcaatcctatgtgaggagtttccccacgagttaggagactttgtgatcctactcaatgcagggatgagcactcgacaagccttgctattcaacttcctttctgcatgttcctgctatgttgggctagcttttggcattttggtgggcaacaatttcgctccaaatattatatttgcacttgctggaggcatgttcctctatatttctctggcagatatgtttccagagatgaatgatatgctgagagaaaaggtaactggaagaaaaaccgatttcaccttcttcatgattcagaatgctggaatgttaactggattcacagccattctactcattaccttgtatgcaggagaaatcgaattggagtaatagaaaatggaagatggtgttgttaataaaggcatttaatagataaaaacatctccaaaaaggattttgaagctgatcctatttagttaaaaagataattttgctttcaaccgtaggtccagaaaactaattattggcatcagtctgtgaaatagtccattatttgttgttaaaaatgcttcaaaaggttttcagtgtcagtctgagatgcctggtatataggagcctttgggaaatacctatttttcagtattccatgcatattgggtatcaccatgaagcaagagacatgcattctataatcatgtagacactcagactcaggggaaaatacaagttatatcctgaaagcctttaaaactctatggtaggatcaaagattcaaatggtttcagagaggttttatttcaattaatttgttctagtgctttcaagagcaagtacatcaaaatgtagaaggtaaaatgtatgcaacactaatataaattattccaagtctttaaggagccaaagaaaaaaaagatttctcacagctttttgttctgttttgtatttcaattaggaacttgcagtattattttgaaaaccattctaaaataataggagttaggaaataaataaagttttgctagccctgctaagttcaggcttagaggcttatcgctaagtgtaaacttcaccagattccacgaaaagctggatagctttttttctgacttatgttgtggttgcacccctcacaaatggcagaacagtatgtaaagctggtaacacctcggtttcagtgcaccatgtgtttgctttgtgaaggtgaagaatatgttggtttagagaaagaaattggatgtaattttatgcaatttacttttaaagacaaacataactatttagcagagaatattttaataaatgcaaaacaacagctggactgctgtacatcaaggacagattaactggaaaacatatgttccttatgtgtgattgagagccattcagaaaagacttcctttgtgttcagcctatacttttccatatggtataccttgaaaaaaattagcacaccatggttatttttctaccttttataaaagacagagcctgtttactcatttagaagatagagaaaattggtctaaaattgaacatcctagattcacactcccaagtcacttaaggtgatttgatggtgaggaaaatgattgacaaagcccaacaatgatctcaggaattacattttccaacagaccaaaaaatgttttcatgtagcagcaatgcagatttggtgaatatttaatatatattttagtatgtatttcactttatgactgacaattaaaaaatattgtttggccaaatagtaaacacccttttgaaacc

SEQ ID NO: 18686 - protein, 393 aa, Homo sapiens [sequence omitted]

SEQ ID NO: 18687 - DNA, 3408 bp, Homo sapiens
  CDS (725)..(1513)
gattcacgtagaccttgtcaggaaattggtcactatccatctaggccctagaagtgagaggaggaatcttacgaactcattttctagttgctttgtattcaaatcttagttgttaattatcttgttctagtaatcacctaaaatattagacacttaaaatgttggggaaacgtaagcgtgtggtgttgacaattaatagactggccccctgaatctccagacaaccaatatcacttaaataagtgatagtcttaatactagtttttagactagtcattggagaacagatgattgatgtcttagggccggagaaacgcagacggcgtaccacacaggaaaagatcgcaattgttcagcagagctttgaaccggggatgacggtctccctcgttgcccggcaacatggtgtagcagccagccagttatttctctggcgtaagcaataccaggaaggaagtcttactgctgtcgccgccggagaacaggttgttcctgcctctgaacttgctgccgccatgaagcagattaaagaactccagcgcctgctcggcaagaaaacgatggaaaatgaactcctcaaagaagccgttgaatatggacgggcaaaaaagtggatagcgcacgcgcccttattgcccggggatggggagtaagcttagtcagccgttgtctccgggtgtcgcgtgcgcagttgcacgtcattctcagacgaaccgatgactggatggatggccgccgcagtcgtcacactgatgatacggatgtgcttctccgtatacaccatgttatcggagagctgccaacgtatggttatcgtcgggtatgggcgctgcttcgcagacaggcagaacttgatggtatgcctgcgatcaatgccaaacgtgtttaccggatcatgcgccagaatgcgctgttgcttgagcgaaaacctgctgtaccgccatcgaaacgggcacatacaggcagagtggccgtgaaagaaagcaatcagcgatggtgctctgacgggttcgagttctgctgtgataacggagagagactgcgtgtcacgttcgcgctggactgctgtgatcgtgaggcactgcactgggcggtcactaccggcggcttcaacagtgaaacagtacaggacgtcatgctgggagcggtggaacgccgcttcggcaacgatcttccgtcgtctccagtggagtggctgacggataatggttcatgctaccgggctaatgaaacacgccagttcgcccggatgttgggacttgaaccgaagaacacggcggtgcggagtccggagagtaacggaatagcagagagcttcgtgaaaacgataaagcgtgactacatcagtatcatgcccaaaccagacgggttaacggcagcaaagaaccttgcagaggcgttcgagcattataacgaatggcatccgcatagtgcgctgggttatcgctcgccacgggaatatctgcggcagcgggcttgtaatgggttaagtgataacagatgtctggaaatataggggcaaatccaattaaggacaagcttgacattattaagaaacttgaggaaggcatctctttcaaaaaactttccgtggtgtacggaattggtgaatccacagttcgtgatattaaaaagaacaaagaaaggattataaactatgcaaacagttcagatcctaccagtggagtatccaaacgtaaatctatgaagtcatcaacatacgaggagcttgatagagttatgatagagtggtttaaccaacagaaaacagatgggattccagtgtccggaacgatttgtgcaatacaagccaagttcttttttgatgctttgggaatggaaggtgattttaatgcatcgtcaggctggctaactcgatttaagcagcgccatggtattccaaaggctgctggtaaaggaacaaaattaaaaggagatgaaactgctgccagagaattttgtggtagctttcaggaatttgttgaaaaagagaatctacaaccagagcaaatttatggtgctgatcaaactggattgttttggaaatgtctaccatcaaggacattaactcttgaaactgaccaaagtacttctgggtgtaggtcaagcagagagagaatcatcattatgtgttgcgcaaatgccacaggtttacacaaacttaatctttgtgttgtggggaaggccaaaaagccccgggcattcaaaggcactgacctttcaaaccttcctgtgacatattacagtcaaaaaggtgcatggatagaacagtctgttttcagacagtggtttgagaagtactttgtgccacaggtacagaagcatttgaaatccaagggacttttagaaaaagcagtgcttcttttagatttccccccagcacgtccaaatgaagaaatgttgagttcagatgatggcagaataattgtgaagtatttgccaccaaatgtcacaagtctgattcaaccaatgagccagggagttctagccactgtaaaaagatactatcgagcaggacttctccagaaatacatggatgaaggaaatgacccaaaaatattttggaagaacttgacagtgttggatgcaatttatgaagtgtcaagagcttggaacatggtaaaatcaagtaccataaccaaagcatggaaaaaacttttccctggcaatgaagagaattcaggtatgaacattgatgaaggagccattttagcagctaatttagcaacagttttacagaacacagaagaatgtgaacatgttgacattgagaatattgatcagtggttcgactctcggagcagtgactcaagctgtcaggtgctgactgacagtgaaagtgctgaggaccagaccaaggctgctgagcaaaagccttccagtaagagtagaaaaacagaactgaatccagagaagcatattagccataaagcggcacttgaatggactgaaaatttactggattatcttgaacaacaagatgacatgcttctgtctgataaattggtattaaggaggcttcggaccataataagaaaaaaacagaagatccaaaataacaaaaatcattaataaggctcttaagtatttcagtgtatctgcatctttgtgactatctgcagtgaaactttgcttgtttgaagtcctgtggattccaaagccaaatacattttataaatgattttggaattagatgtcagtttggattacttaaattacaactctttaatgttgactctagtcattgggcattgacgtgtaacttgtctttctactgtttctaatatctattaattagatcataaggtacctgaggccagggatcttgtgtctgttgtgcctgaatttggcgtgtctaataaaggcccatgcacactataggcactcaataaaacttacatttttatg

SEQ ID NO: 18688 - protein, 263 aa, Homo sapiens
MDGRRSRHTDDTDVLLRIHHVIGELPTYGYRRVWALLRRQAELDGMPAINAKRVYRIMRQNALLLERKPAVPPSKRAHTGRVAVKESNQRWCSDGFEFCCDNGERLRVTFALDCCDREALHWAVTTGGFNSETVQDVMLGAVERRFGNDLPSSPVEWLTDNGSCYRANETRQFARMLGLEPKNTAVRSPESNGIAESFVKTIKRDYISIMPKPDGLTAAKNLAEAFEHYNEWHPHSALGYRSPREYLRQRACNGLSDNRCLEI

SEQ ID NO: 18689 - DNA, 4077 bp, Homo sapiens
tttcctgcattgcatcatcatagcttttaatataatgctacagaatcatatccacattaggttagagttcagatatttggatatgaatacctaacctagccatatccatggccatctctgttcttttcagcaatgttttccatattatattagcaatgacagaaacagaacaagccaagatccagtcagttcttgggagcttgtctagagcaccaagtaatgaaatagccaggtagtgggatgactgtacctttaaaaatacataatttagtttgcaagctatattatgctactttctattttccttgttactttatagcaattcattttaccctcacaaagtcaatttagaaccttatcattaactgggatgtgtagtgatatttttgggcctctgggtttcatgtgttaatacgaggaatatttatttaaaatagatttatttagaggaggcacagtgttgttgatctgtgtgacaccacccatatttttaaaaacctttgtatgtttctctaaatttgttgttgactgaatataatagaccctaccataattcgtcaaatatcactgattagttacatcctttgtgtgagattagctgtaaagtatactgctcttattcttattcagaatagttaattggtagccaaaaatacatgtatcacagatgttaggtcgaatttaaacagcacagtcaagtgctatggaagtttttctgctaaattagtagattaaagaattctataccctaggcatggggagcagcacgttttcctttggtaggtaggatctctatactagtgaacagtgccagttccacactttggacttagaactgttctctagttattgtaacacagaatactgtcaatccctaatttacttaatgttacttattggaagtggggctgatgaaatacgcacaggagggaaatctactgtgtttaggcacaggcagccccagtgtataaggagatcatattccaaaaggttgtcagttggttgtttgcaacctggaatgtattttcctttagagaccaggttatccatggtggttaggcccctagagcagctggaaaagatgatcaaaccaataggttagctgacatcgaataatgtaataggtttgctaaagaatctaaccatcaaatataatattgtttccagggagggtgtttgttcagagttgcctgttagtagaatctggactgtccatcccagccacatcccacctactggacagtaggggtagagatgccaccagactacaggtgaccagattggcctgaaacatggtgtccagtaaaaacggggaggaataagtccatgactgccggagagcttggtggtaggaggagggtgaaggagggtgagggggcctctcatgggtcagaaacctccagggacatccctcagctggtaactctgctgttgtccggagggttcaggcttggtgtgccttcttctgtttgtctgacttttggctcctatggttcatctcctgccctgcccatcacagaaaaggatgctgctgcacagcttctccaatgtaccagtcattgaggccagcgcgcagcacttttaatgtttttagtgctagtaactgtgttttaactctccaggaataagctgggaggttagaaaacaagaaaaaagggggaaaaaaaaacctctccacccactttccttttttacagttacagaccctgttgagaaaaagaagcacccagatgggtgatggtgatagggcttgtggtggacacagggttgtggtaagattcctcagtgcttcggcgagcacctaagactattaccctggaactgtctgctttctagagcttgattcatgcctctaagccagtggttctcaaagtgtggcccctagaccagtagcatcagcatcatcggggacctcattagaatgcagattctcagccccctcccagacatggtgaagtcagaagctctcagggagggactcagcaaatgattctaaagcgcatcaagtttgagaaccaccctaagccaatgagtctcccttttactccccattagtcctccctcaccagatgattcctaggactcatggtgcaacatacaggagccaggctttagggaggggaggaaaggagcctggcggcaggggtctctgcaatggcaagaaagtgagtgaatccagcgctgccacctggttatccccttctcgttgaaaatagcagcgcgggtgcaaattcctaaacgcaggctgcctgcactcggtgttacctcgggctgaggcatgataatattttattttttaaagctgtgaggaaatgaaagtgaggctttggttggggcgaggcagttgtgaaagaaattaaaataaaagaccctttgtaaatgcagacttagaagaaatactgaatttgtgtcagaagttctccagtgtttgtgttaatcgtgtggtgataatcctgtcctccttttaaagcgaattctctactgaaaggtctgctctgcttaaggagctacaaactgctctcaaaagaatgaaatactgagttccaattcagtgaggcacagtgttggactatggcacatttagttggagtcggggggaggtcaggaatatgatcggataatggattttataccttagagcaaaatctattagtctctctcagtttatcaatttaaatggctttaggcttatagggggtgtaaactttaagaatataattctcccattcaagtttacagcaaacatctagccaccttcaaaacaaagaagatacagaccatcatttagcaatactaatacatgattttccttggggatggcaggtttgagaatcctttagcaacaggacatacttcccctaaattacagtgaattatttataacgagataaagctttcaggtacaagctgaaggtggggtgtctaacaactaaaaactatcactaaatctcaaagagaaagttcttgcaaaatatgtaaagttcacaaggtgcagacattttcattctttaggcttttatctaaggaagggctatgaaactgggcccatctgtatacaggctcaaatttacgtttttaaaggaagaatctatgcagctgaggcttattgcaggaaatacttcatttgtatgtaaatattattgtaaataaataggaggctgtatatttttgaagttgttgatccgcactgaaatagaagtctctaggatctgcatataaacaataaatgtttcctagaaattagtggttttgtttgggaattagaaaaatttacattctctcccaggtaacatagttctctcaatgtaaacttggaacctgaaaccctacttaatttagagaaagaaatgtctgagaaatagttcccttgatttcttatgctggcattaagatcaattatttaacagatagtcctctgagatacaagtaaggaatatttagacacaaatccttgtcctatagaaacagatatacccaaatgacaaattgtttcttcataatgatcttccatttttaacactgataccactacacagtacatatgaaaacagaagctggggagaagaatgtttttttcacaattgaattgctgcatttctcaaactttgggatctatgaaagcggggagagggaacctgaatattaattatgagcacaaatttgaaggaaagaaaacaaagaaccattatctaatcaagctttgaaagtcctgcatgtttgccttttattttagtgttgacgccaacatagactgtctaaggtatttttttccccaaacacttgaatcttggtcgttggtatgtaatccactctctagagtccagtgtactttagacttcatctgagtccaatatatgtaccacactactgttttattaatgtaaaaaccttgtaaatgaatttcagatgggtgatttaagtgagtcacaagtcacaaaactttgctattcatagttaatcaaatagaactgggtttttttttcagagtgtggtgtaaataaagaaatataagaagttctgttctataactgctctgttaacatagtttttaaacattaaaaaatgtgaactaaaagt

SEQ ID NO: 18690 - DNA, 2347 bp, Homo sapiens
  CDS (458)..(1168)
ctacgttgtcttttcacttctctggggaggagtgatctggccgttcctcaactaccagaggatgtactacgtgttcatccagatgctgtccagcgggcccgcctggctggccatcgtgctgctggtgaccatcagcctccttcccgacgtcctcaagaaagtcctgtgccggcagctgtggccaacagcaacagagagagtccagaatgggtgcgcacagcctcgggaccgcgactcagaattcacccctcttgcctctctgcagagcccaggctaccagagcacctgtccctcggccgcctggtacagctcccactctcagcaggtgacactcgcggcctggaaggagaaggtgtccacggagcccccacccatcctcggcggttcccatcaccactgcagttccatcccaagtcacagctgccctaggtcccgtgtgggaatgctcgtgtgatggatggtcctaagcctgtggagactgtgcacgtgcctcttcctggcccccagcaggcaaggaggggggtcacaggccttgccctcgagcatggcaccctggccgcctggacccagcactgtggttgttgagccacaccagtggcctctgggcattcggctcaacgcaggagggacattctgctggcccaccctgcgcgctgtcatgcagaggccattcccccaggcctgtgtcttcacccacctgccatcattggcctttgctgtcactgggagagaagagccgtccagggacccatggtggcccacatgtggatgccacatgctgctgtttcctgcttgcccggccaccacccatgccctccatagggtgaggtggagccatggtggtgcgtcctttactcaacaaccctccaatccggatgctgtgggaagggccgggtcactcggataccatcatccctgcggatgcaccgccgtaccctgctcatctgggagtggtttccctgcggttacgtccaagcccgcctgccctgtgtgttggggctggctgagtttcggtctccccatcaccggccgcctcgtggagaaggcagtgccacgtgggaggacaaggccacgccggcagcttccagccctgccgcagaagtgccaggatgtccatcagccactcgccagggcacggagccgtcagtccactgttacgggagaatgttgatttcgcgggtgcgagggccgggagacagatacttggctgtgatgagcagacatcctctgtccccgtggaggggtcaacaccaaggtggtgttcgtgcaccagaacctgtctcgggctgacgggggtggcacacaggacacgggtggatcccaacaggcagcaccgcacctctgcccgcctcccgcactgcagctccgcccgccgggctctgcgtccccacgtcccctcgtcccatccccacgtcccctcatcccgtcacctcgtccccacatccccttgccccgtcacctcgtcctcatgtccccttgtcctgtcacctcgtccccacgtcccctcgtctcctcatccccacgtcccctcgtccccttgtcccgtccccacataccctcgtccccatgtccccacgcagggctctccttcgtcttaggatctgtccagcgctgctctgggtgggttagcaaccccagggctgctgtgataggaagtccctgttgttctccgtactggcatttctatttctagaaataatatttgacatagccttaatggtccttaaagaagacatttcagtgtgagattcagacttcagacgctgaaactgctgcctttcaggaaagcaccaccaacgctggaggaggagccggccctcacgcccgccccgcgccacgctgtggaacggggctccggcaagtgaaacccagagggtgtttccgaggtgctcgacagtaggtatttttggaagctcagatttcaccatttgattgtataatcttttacctataaaatatttatttgaagtagagggtaaatcagtggtaagaacagtgaacacagtggttgggataaaataaggtgacaaacatcacaccaaagatgagggtagcgagcaactggcttgagcagacagaacggggaagactcactctgtcccgaggggccagccgcaggcgtccccagggccaccctgccctgaggtccttgtgtggccgccctggcttggcagccctgcccacgctgcccccgcaaacaatggtgtgtgcgtttttacagccctttttaggaacccaatatgggcataaatgtaacacctgtagcgggggcagattctctgtatgttcagttaacaaattatttgtaatgtatttttttagaaatcttaaaattgcctttgcactg

SEQ ID NO: 18691 - protein, 237 aa, Homo sapiens [sequence omitted]

SEQ ID NO: 18692 - DNA, 2362 bp, Homo sapiens
  CDS (26)..(976)
cctttattatacagaagcaggatctatgttttttactctttttgcgtatttgatgtgtctttatggaaatcataaaacttcagccttccttggattttgtggcttcatgtttcggcaaacaaatatcatctgggctgtcttctgtgcaggaaatgtcattgcacaaaagttaacggaggcttggaaaactgagctacaaaagaaggaagacagacttccacctattaaaggaccatttgcagaattcagaaaaattcttcagtttcttttggcttattccatgtcctttaaaaacttgagtatgcttttgcttctgacttggccctacatccttctgggatttctgttttgtgcttttgtagtagttaatggtggaattgttattggcgatcggagtagtcatgaggcctgtcttcattttcctcaactattctactttttttcatttactctctttttttcctttcctcatctcctgtctcctagcaaaattaagacttttctttccttagtttggaaacgtagaattctgttttttgtggttaccttagtctctgtgtttttagtttggaaattcacttatgctcataaatacttgctagcagacaatagacattatactttctatgtgtggaaaagagtttttcaaagatatgaaactgtaaaatatttgttagttccagcctatatatttgctggttggagtacagctgactcattgaaatcaaagtcaattttttggaatttaatgtttttcatatgcttgttcactgttatagttcctcagaaactgctggaatttcgttacttcattttaccttatgtcatttataggcttaacatacctctgcctcccacatccagactcatttgtgaactgagctgctatgcagttgttaatttcataacttttttcatctttctgaacaagacttttcagtggccaaatagtcaggacattcaaaggtttatgtggtaatatcagtgatatttcgaactgtgaaaatggacttaataattagaccatttctacaaagaacaactgaataggtggaaaacatggaatttcttttaggtgcagtggtggtcttcaaattacattagttttttttatatatattttaaacatatgtaagaaattaagtggcaaagaactgagaaagcttaagacctgcttcaaaagcctgaaaaatggaaaaataaaattgttttcagatatctcatatcactctcataatgttggccccttaaaaagcttgggaatgttttgtatgtacaagtttattaaaactgggtatgcttcatattactggaatgaatttattctcttcagagagaaatattaggttggtgcaaaagtaattgtggtttttgccattgaaagtaatggcaaaaccacaattacttttttaccaacctaataacaatgtattagcaaatatttacaaatggtcaggtgatattcttgattgaaaagttgcttaacatttcagtaatataattttaattctaagtcaaaatacaaatgcatagatagtaaatgataaagtagagactcattatgcctgtctagacatcaaattgttggttattgtttacaatctagaaatgatgaagctctttcactaattcctaatatgaaatgtatgatggccaaagacaaattgtattgattataatcctttaaaagggggatttcctttctgaaatacatattgtattagcttcccagggcttccataacaaatgacgacaaacttgggtgcttacaacaattttcctcacagtctggaggccagaagtctaaaatcaaagtgtcagcagagttggttccttctggaggctctaaggaagaatccataaacagacattctatgtctgtttcctaatatcttgtggctgtgtgcaattcttggagttctttggcttctggacaaatcttgtccaagtattgcagacagcaatcttcactccagtctctgcctctgtgttcacacggcctttccctctgtcttctcttcattaccttttaaggacagtgtctttgaatgtagggcccaccctgatctagggtgattgtgtctggagacccttaattatgtttacaaagacccatgttccaagtaagtttgtattcacatgatctgagtagacattgtctcttcgtgggatacttttcagtccatgacagttactaaaggacattttaggatagtcttcatatgattgttaggagactacctttttagattttttttattatatatcaaattatagttgtatatacttatgagaaacaaagtggcattatgatttttgaatataatgtgggattaaataaagctaatctatccatcacctc

SEQ ID NO: 18693 - protein, 317 aa, Homo sapiens
MFFTLFAYLMCLYGNHKTSAFLGFCGFMFRQTNIIWAVFCAGNVIAQKLTEAWKTELQKKEDRLPPIKGPFAEFRKILQFLLAYSMSFKNLSMLLLLTWPYILLGFLFCAFVVVNGGIVIGDRSSHEACLHFPQLFYFFSFTLFFSFPHLLSPSKIKTFLSLVWKRRILFFVVTLVSVFLVWKFTYAHKYLLADNRHYTFYVWKRVFQRYETVKYLLVPAYIFAGWSTADSLKSKSIFWNLMFFICLFTVIVPQKLLEFRYFILPYVIYRLNIPLPPTSRLICELSCYAVVNFITFFIFLNKTFQWPNSQDIQRFMW

SEQ ID NO: 18694 - DNA, 2698 bp, Homo sapiens
  CDS (467)..(2143)
tcagggagcccttaatgcctcagaaaccacacccaaagaacttcggatcaagagacaaaactcctcagatagcatctcaagcctcaacagcatcactagccattccagcatcggcagcagcaaggatgctgatgcgaaaaagaagaaaaaaaagagttggcttcgaagttccttcaacaaagcgttcagtataaaaaaggggcccaagtcagcttcctcatactcggatatagaggagattgctacacccgactcttcagccccctcatcccccaaactacagcatggttctacagagactgcttcaccctccatcaagtcctccacctcgtcctccgtgggcactgatgtcaccgagggccctgctcacccagccccccacactaggctgttccatgcaaatgaggaggaggagccagagaagaaggaggtatcggagctgcgctctgagctatgggagaaggaaatgaagcttacagacatccgcttggaggccctcaactctgcccaccaactggatcagcttcgggagaccatgcacaacatgcagttggaggtggacctgctgaaagcagagaatgaccgactgaaggtagccccaggcccctcatcaggctccactccagggcaggtccctggatcatctgcattatcttccccacgccgctccctaggcctggcactcacccattccttcggccccagtcttgcagacacagacctgtcacccatggatggcatcagtacttgtggtccaaaggaggaagtgaccctccgggtggtggtgaggatgcccccgcagcacatcatcaaaggggacttgaagcagcaggaattcttcctgggctgtagcaaggtcagtggaaaagttgactggaagatgctggatgaagctgttttccaagtgttcaaggactatatttctaaaatggacccagcctctaccctgggactaagcactgagtccatccatggctacagcatcagccacgtgaaacgagtgttggatgcagagccccccgagatgcctccttgccgtcgaggtgtcaataacatatcagtctccctcaaaggtctgaaggagaaatgcgtcgacagcctggtgttcgagacgctgatccccaagccgatgatgcagcactacataagcctcctgctgaagcaccggcgcctcgtcctctcgggccccagcggcacgggcaagacctacctgaccaatcgcttggccgagtacctggtggagcgctctggccgtgaggtcacagagggcatcgtcagcaccttcaacatgcaccagcagtcttgcaaggatctgcaactgtatctttccaacctagccaaccagatagaccgggaaacaggaattggggatgtgcccctggtgattctattggatgacctgagtgaagcaggctccatcagtgagttggtcaatggggccctcacctgcaagtatcataaatgtccctatattataggtaccaccaatcagcctgtaaaaatgacacccaaccatggcttgcacttgagcttcaggatgttgaccttctccaacaacgtggagccagccaatggcttcctggttcgttacctgaggaggaagctggtagagtcagacagcgacatcaatgccaacaaggaagagctgcttcgggtgctcgactgggtacccaagctgtggtatcatctccacaccttccttgagaagcacagcacctcagacttcctcatcggcccttgcttctttctgtcgtgtcccattggcattgaggacttccggacctggttcattgacctgtggaacaactctatcattccctatctacaggaaggagccaaggatgggataaaggtccatggacagaaagctgcttgggaggacccagtgaaatgggtccgggacacacttccctggccatcagcccaacaagaccaatcaaagctgtaccacctgcccccacccaccgtgggccctcacagcattgcctcacctcccgaggataggacagtcaaagacagcaccccaagttctctggactcagatcctctgatggccatgctgctgaaacttcaagaagctgccaactacattgagtctccagatcgagaaaccatcctggaccccaaccttcaggcaacactttaagggttcggcaatcactgtcacccccggacagcagaacgctggcatcagctatcttagctcctcctctcccctctcctctttcagagcactggctctccagccccaggaggagaacaggagggaggaggagatgaaagaggagggacaggttcttggtgctgtacctttgagaacttcctaggaaggaatggtggggtggcgtttgggaacttgtgccccctaaacacatttactggcctcctctaatgactttggggaaatgatgattctgggtctttcccttgacttcttgtttcaattacaagctcctgggctttctggggaggggttcagaaaacatcaaaacactgcagcagttcctaaatgattctcacaagcaaccctgagagagacagtcttgtgagggagatctgggggaggcaggaagctcctcagattttctcacagacccttcccaattccatcaccactgccaacaactcctcccccagagatctggctggagcccagaaaaagaagcatgtggtttaaaaaatgtttaaatcaatctgt

SEQ ID NO: 18695 - protein, 559 aa, Homo sapiens [sequence omitted]

SEQ ID NO: 18696 - DNA, 3035 bp, Homo sapiens
  CDS (751)..(2583)
aagggctactccgggatctacggacccgggttcccctggcgtaggtcggccctcggccgcagggtgaggctgggcatgcagccgggaccccgggcgtcctgtcccgttcctgcgcggcgactgcggccccggcgccctctctgggcagctccgcgcccgcagcctcgcgtctcccgagattgtgcggctgtaagcaacacaggttcgcggcccgactcactgcaccgagacgctgagggctgcagcagaaacagtttaatagccagagaggggaggacaccccagatccgcctccctgagggatttggggtctggacgggggcggctgggtgtagggtcgttggttggtggggaagtgaggggtgaatcctgggacaggaggtgaagaaaccgcattctgctgaatgggctccctcgttgggacttcaacctgattggcgccagcctttgctgggattcaggatctgagaactccggcgactcttgagcagttctcagagatcttatccccaggcacaatggggaagccggcggtcagcgtctgctgtgacctgactctcagggaggcggccccttgaggcagcggggctgagggcacctggttaatatctaactgcaatctcgcctccagcctggctcgcagttcctgtgaacccggcctcagtggctttagaggatgtggctgtgaacttcacccgagaagagtgggctttgctgggtccttgtcagaagaatctctacaaagatgtgatgcaggaaaccatcaggaacctggattgtgtaggaatgaaatggaaagaccagaacattgaagatcaatatagatatcccaggaaaaatctaagatgtcgtatgttagagagatttgttgaaagtaaagatggaactcaatgtggagaaacatctagccagattcaagatagtattgtgaccaagaacactcttcctggagtaggtccatatgaaagccgtatgagtggagaagtcatcatgggtcattcatcccttaattgttacatcagagttggtgctgggcacaaaccatatgagtatcatgaatgtggagagaagccagatacgcataaacaacgtgggaaagccttcagttaccacaactcacttcaaacacatgagaggcttcacactggaaagaaaccatataattgtaaagaatgtgggaagtccttcagttctttgggaaaccttcaaagacacatggcagtgcagcgtggagatggaccttataaatgtaagttgtgtgggaaagcgtttttttggcccagtttattacatatgcatgagagaacgcacactggagagaaaccatatgaatgtaagcagtgttctaaagccttttctttttacagttcctatctaagacatgaaagaacacatactggggagaaaccgtatgaatgtaaacagtgttctaaagccttccctgattacagttcttgtctaagacatgaaagaactcacactggaaagaaaccctatacatgtaaacaatgtgggaaagccttcagtgcttccacttcccttcgaagacacgaaacaactcacactgatgagaaaccctatgcatgtcagcaatgtgggaaagcgtttcatcatctgggaagctttcaaagacacatggtaatgcacacgagagatggacctcataagtgtaagatatgtggaaaaggctttgattgtcctagttcactgaaaagtcatgaaagaactcacactggagagaaactctatgaatgcaagcagtgtgggaaagcgttatctcatagctcaagctttcgaagacacatgacaatgcacactggagatggacctcacaaatgcaagatatgtgggaaagcctttgtttatcccagtgtatttcaaaggcatgaaaagactcacactgcagagaaaccctataaatgtaaacaatgtggcaaagcctaccgtatttccagttctcttcgaaggcatgaaacaactcatactggagagaaaccctataaatgcaaatgtgggaaagcctttattgatttctattcctttcaaaatcacaaaacaactcatgctggagagaagccatatgagtgtaaggaatgtgggaaagcattcagttgtttccaatacctttctcaacatagaaggactcacacaggagagaaaccttatgagtgtaacacatgtaagaaagccttcagtcattttggtaacttaaaagtacatgaaagaattcactctggagagaagccgtatgaatgtaaggaatgtgggaaagcattctcttggctcacttgctttctacgacatgaaagaattcacatgagagagaaaccctatgagtgtcaacaatgtggtaaagccttcactcattcccgttttcttcaaggacatgaaaaaactcatactggagagaacccgtatgaatgtaaggaatgtgggaaagcatttgcttctctcagttccttgcatagacataaaaagactcactggaaaaaaactcacactggagagaacccgtatggatgtaaggaatgtgggaaagcatttgcttctctcagttccttgcatagacataaaaagactcactagcattctctctaaatgtatggaatgtgggaaagcatttattaattttatttcatttcagatacttgtacgaaacacattggagatagaccctgtgaatgtaagcacttggtaaaaccttaagtaatttcagtttctttccagtacagtcatcccttgatacctgctgggtattggttccagcactccgtgagccatgtccagtcccttttataaaatgacatatttgtatgtaacttacccacatcctcttgtatactctcaattatgtctagattacttaaaatacctcatgcattgtaaaagctatgcaaatagttgttctattgtattgtttagggactcatgataaggaaaagagtctatgtattttcagtatagatgcagtaattgtcagcctatcaacatagtatagtcagccagaacattaaagtttctttgtttcaactctc

SEQ ID NO: 18697 - protein, 611 aa, Homo sapiens [sequence omitted]

SEQ ID NO: 18698 - DNA, 3980 bp, Homo sapiens
  CDS (42)..(1328)
ttcaacacctgcagaacatagtggactttgggaaaaatgtcatgaaggagtttttgggggagaactatgttcattatggggaggtcgttcagctacctttagagtttgtgaaacagctttgtttaaagatacaatctgaaagaccagagtctcgctgtgacaaggacctggatactctcagtggttacgctatgtgccttcctaatttaaccagactccaaacctaccgctttgcagagcaccggccgattctgtgtgtagagattaagccaaaatgtgggtttattcctttctcgagtgatgtcacgcatgagatgaagcataaggtctgtcgatactgcatgcaccagcacctcaaggtagcaactgggaagtggaagcagatcagcaaatactgtccccttgatctctactcaggaaacaaacagagaatgcactttgccttgaagagtttgctgcaggaggcacagaacaacttgaagatatttaagaatggtgagctgatttacggctgcaaagatgcccggagccccgtggctgactggagcgagcttgcacaccacctgaagccgttcttcttcccttccaacggcctggccagtgggccccactgcacaagggctgtgatcagggagctggtgcacgcgatcacacgggtgctgctgagtggctcggacaagggccgggcaggcaccctgagtccggggctcgggcctcagggcccgcgagtctgcgaagccagccctttcagtaggagcctgcgctgccaaggaaaaaacaccccagagcgctcggggttaccgaagggctgtcttctgtacaaaaccctccaggtgcagatgttggacctgctggacatcgaaggcctctaccctctgtacaaccgggttgagcgatacctggaagagtttcccgaggagagaaaaaccttacaaatagatgggccttatgatgaagcattttaccagaagctgcttgacctttccactgaggatgacgggacagtggccttcgcgctaacgaaggtgcagcagtaccgcgtcgccatgactgccaaggactgctccatcatgattgcactgtctccctgtctgcaggatgccagctctgatcaaaggcctgtcgtcccttcatcgaggtccaggtttgccttttccgtgtctgtgctggaccttgacctcaagccctacgagagcattccccatcagtataaactggacggcaagatcgtcaactattattcaaagactgtacgtgccaaagacaacgccgtgatgtcgactcggttcaaggaaagcgaagattgcacattagttctccacaaggtctaactctttccctgcagtgtctttgaaacttgaacataatgtgaaggctgaatgatagagatattttctgttgtgttgggtgacctttggttgtgaatgtttttgcttttaaccccttttgaggtgggattgcctcttggagacatggaattgaagagcactagaaacaacttcctggacaaggaatgtaggaagtgagtgctgtgtcccaggaagctgctcacactcttaaaatggaagtgtccgttaagccctgggaagacgttctggatagttcttctttcccaaccagggctcatgtctgattctctaatgcgaaaagccttattctaagacccaaggtttggatctgctaccaccagactcctaacatagaaaacttgaattgtcacatacattttacagtttggacttttaagaaaacatggatactactggaacttcccccagctgagttacatggtcactttttcagtgcaagccacatatcaacacaggtttttaggtggttccctgctgcacagcgtgacctcgtggtcgcgcagatgccgattctgagcagtgtagactcagggtccctgtggaggtgctgaagcccacagttccacacagggcagcagggagcgcaaggctcaggtcaggatggacaccactcatgcgagcattgaccttttttttttttgctttacaatttaatctttcacatgagggggagatgagctgttctttcccactaaaaattgctgctgtagaagttggaggtggagctgtgactggctgagctgctgtggccgggctgggcagtgtgccccaacagctcagtgctttcctgacactccagtgtctggggtggttgaggagcgagttctctcttcctcccagaccaagttcctccctcgggtttgccttgagacgtgttgcgtttttgggccccgtggcctctccctgttaggctgccacaggccctgcttctggaaggtgaacagctcctggctgctgccgagagggttctcgttggggtcaccaaagtgtgcccggctgctatgaaaaacgttgggaatcttggtttcagttttttattctatgctaggttgtacagacttatttatatcatcgttttgagggactaatggaggcttattgtaacatataatattagtgaaaccatggaattatatgaaaatgatacatgagaaataaggaaactattttgctgattgtaaatttttgtgggaaattttgtgataacttgagaattatacttgtttgaatcaaggcaactcttctagaatttattgttcaattctgtcatatttacttctaattctactctcagaggtgcaaaaagatacttatctaactggacacttttactgttttcttctcacttccaatgacaccgtctcatacacacgggtcctgtgtgctgggatgggggctttggtgaagtgcacggagctcacggacaagccgcaggctctgggaagcgtggaggtagtggccgttgagtactgtcttgacccaagggagttcactgttgctgggctggggctggggcagcctggtttgggatgattttgcccattgtcacggtgtgtggaggatgctgggtcctgggttcaagtgcacatgtgagggaaccccagtccgtgggaaggtgggctgggctccctaggtccttcagggctgcaagagttattgcctagcacagggcccagacagggctggactagacacgatgaaaacagcctgtatttgagggagaagagaaaacagatggagacccccactctgtctggtcttggctcccaccagcccgggctgtgaggagcccctgagccgcgggtgccactgctgtggatgcgtttctggcccgtcttggaaactgctgctgctgcgtagtcatgacggccctgactggtttgagacaacacgcgttcacagatcttaacaatgctaaatgggcgactgatgaggtcacggttcttaaggcacatccgggacgatcgatatagcacttaggctatgcaggggggtctttctttcataaaggacctcattccttgcgtcccagcccaggaacagtgctgtctttgctgtcttaggccattcttgttattaagctgacagcttcactttcttgtggaagaccaagaacagcatgaggacttgctgagactgcctcacggtgccaccatgcggaccggggggaggcagggagtgagggtgtggctcccctgggctactaaggacagtttaaagatgaggcgccataggcatccgtctccagagcccccaggaggcaggaaccaggataagggtggcttctcccagctgagtaatgtggccaccatgtccaaggtggactcggtgtgaggctgcagtgggtgggggatggatcctccccacacatctgaggacacacaaccacttggtacattttctcagatgttaagcttatttttataaaccgcattgtacgtgtcacttttatttggcattttatacttaactagctgtatttatttttcatgtcatgagagtttccatataatgtgccataactgcatagacagcacgtcttcagggtgtggtttctaagcagaaaatagcaaatgtttatattgaataaaattgcatgttcctccacgc

SEQ ID NO: 18699 - protein, 429 aa, Homo sapiens [sequence omitted]

SEQ ID NO: 18700 - DNA, 2613 bp, Homo sapiens
  CDS (813)..(1112)
aaatcaacttggattaacctttcagttacctctgccagaactggagatatttcaaggtgaagggaagatttatgaatgtaatcaagttcaaaagttcatcagccacagttcttcagtttcgccacttcaaagaatttactctggggtcaaaacccacatatttaataaacataggaatgattttgttgattttccattgctgtcacaagaacagaaagcacacattaggagaaaaccttacgaatgtaatgagcagggcaaagtcttcagagtgtcttcaagccttcctaatcatcaagtaatccacactgcagataaacctaacagatgtcatgaatgtggtaaaaccgtcagggacaagtcaggcctcgcagaacattggagaattcgtacaggagagaaaccttacaaatgtaaagagtgtggcaagctcttcaatcgaattgcataccttgcacgacacgagaaagtgcatactggagagagtccttacaaatgtaatgagtgtggcaaggtcttcagtcgaattacataccttgtacgacatcagaaaattcatactagagagaaacctcataaatgtaacaaatgtggcaaggtttatagtagcagttcatacctagcacaacattggagaattcatacaggagagaaactttacaaatgtaataaatgtggcaaagaatttagtgggcattcaagcctcaccacccatctgttaatccacactggagagaaaccttacaaatgtaaagaatgtgacaaagcttttaggcacaagttctccctgacagttcatcagagaaatcataatggagagaaaccttataaatgtcatgaatgtggcaaagtcttcactcaagtttcacatcttgcacgacatcagaaaattcacactggagagaaaccttacaaatgtaatgagtgtggcaaagtcttcactcagaattcacaccttgcaaatcatcagagaatccacactggagagaaaccttacaaatgccatgtgtgtggtaaggtctttaggcacagttcatggtttgtacagcatcagagaagtgttcatgagagagtccttacaaactgagtttggcaaactctatcataagttctagcagtaatcaacatccgagagtctatactagaaagaaatcatttaaatgtactatatgtggcacaggctgtatcgagacctaccaaatcactagacatcgaaacattcatctttggtgaaaccacacaaatggattgtgtgtgccaaggccaacaagtcaaaatatgttgaacctaatgatatgatgtgtataaagggtgcaaggacacgtggaaatgatctgtaatattcgggttattaaaaatgtaattggctgggcgcagtggctcacacctgtaatcctagcactttgggaggttgaggcaggtggatcacaaggtcaggagtttgagaccagcctggccaatatggtgaaacaccatatctactataaatacaaaaaaattagccaggcgtggtggcacatgcctgcaatcccagctactcgggaggctgaggcaggagaattgcttgaatccaggaggcagaggttgttgcagtgagctgagatcgcgccactgcactccaacctgggtgacagagcgagactccgtctcaaaaaaaaaaaaaaattatttgggtttgaaaggccaggggcagtggttcatgcctataatctcagcacaatagaaagccaagacaggagggtcacttgatgcctggagatcaagataagtatgggcaacgtagcaaggcccatccctacaaaataaaaaaaataagccaggcccttggcatgtgtctgtagttccagctactcaagaggccgaggcaagaggattgctcaagcccaggagtttgagagtttgagcagtgagctctgatcttgccatttgtactccagcttgggtgacagagcgagaccctgtctcaaaagaaaaaaaaggctagtttttatgacttcaacctgaactttgaaatttcttcatgtgccttccctacaggcctttcactgtggtctgggaaagaatcagtaagatgacagggctgacttcattagatgaggagcgtttctatccagtttcctggaggaataaggacactgccttttcagattaaagattgtctgatttagagaccatggaggtggacagagaataacaaaaccgtgatggcagtcatcatgcttattgcagttagcacacacttttcctgacaggcacagtgctgctgtgctctacaaatgaccatgaaatagagcacgccatgactttaggacacagggatttttatgggaagagagttcatcagggactgattacgtaggagagacgatgcaggggaaatggtggccaccgtctccattgaatagcaatagctgctgtttagcaaagactgattaaaaagtactctgatttttcaaatggaagagagaacagttaaatcagagtagagagtttaatcaaaactaccagtggaacatgttcttgagtaggattcacatttaactgctggcataatttgcaactgttggattttctcatgtttggaacaataaagttgaaattttccaaagtgtg

SEQ ID NO: 18701 - protein, 100 aa, Homo sapiens [sequence omitted]

SEQ ID NO: 18702 - DNA, 2720 bp, Homo sapiens
  CDS (379)..(2019)
acccggcctgccccgcggcaagatggcggcctgaacgcagctggcagcggcggaaagcttagatcagcctttccacagctgttagcagcatctgccccaatttcagctgaagattcaggtgccccagggactggaagaaattacagtgcctacttggaaagaagaagagatagcgacttgccccagtccaaccccagagcgggagctgtggctaaaggaagtggaggggccgtgggatgcggagagccgagggctaactcccggacagcggaacagagagagctgccgacaaacagacgtccagagtccttctggccacatctctgagcctgcctccttcttgcttctcagcaggcggaggagccgtcacctcccagaatgactagtgccgcccctgctaagaaaccctaccgtaaggcaccaccagagcatcgggagctgcgtttggaaattcctggatcccggcttgagcaggaggaacccctgactgatgcagaaaggatgaagctcttacaggaggagaatgaagagcttcgccggcgcctggcctccgccaccagacgcactgaggccctggaacgtgagctggaaattgggcaggactgcctggagctggagctgggccagagccgcgaggagctggacaaatttaaggataagttccgcaggctgcagaacagctacacggcttcccagcggaccaaccaggagttggaggacaagctgcacacactgatcaagaaggctgagatggataggaagacgctggactgggagattgtggagctgaccaacaagctgctggatgccaagaacaccatcaacaagctggaagagctcaatgagcggtaccggctggactgcaacccggctgtacagctcctcaagtgcaacaagtcccacttccgaaaccacaagtttgccgatctgccctgtgagctacaggacatggttcggaaacatttgcacagtggtcaagaggccgccagcccaggtcctgctcccagcctagccccaggggctgtggtgcctacctcagtcattgcccgagtgttagagaagccggagtctctactgctcaattcagcccagtcaggcagcgccgggcgccccttggctgaggatgtctttgtgcatgtggacatgagtgagggtgtcccaggtgatccagccagtcccccggcccctggcagccccaccccacaacccaatggggagtgccactctctgggtactgccaggggctccccggaggaagagctgcccctgccagcctttgagaagctgaacccctacccaaccccgtctccaccacacccactgtatcctggccgcagggtaatagagttctctgaggataaggttcggatcccccgcaacagccccctgcccaactgcacttacgctacccgccaggccatttccctgagcctggtagaggaggggagtgagcgggcccgccccagcccagtgcccagcacccctgcctcagcccaggcctcaccccaccaccagcccagcccagcacccctaacactcagtgccccagctagctctgccagctctgaagaggacctgctggtcagctggcagcgggcatttgtggaccgtactccaccacctgctgctgtggcccagcgcacagcctttggacgcgatgccctccctgagctgcagcgccattttgcccatagccccgctgacagagatgaggtggtccaggcaccttctgcccgacccgaagagagtgagcttttgctacccacagaacctgactctggctttcccagggaggaagaagagctgaacctgcctatcagtcctgaggaagagcgccagagcctgctgcccattaacaggggcacagaggaggggccaggcacttcccacaccgagggcagggcctggccactccccagctccagtcgcccccagcgcagccccaagaggatgggggttcaccacctgcaccgcaaggacagcctgacccaggcccaggagcagggcaacctgctcaactagggcccctgctggccttcctgccattgctgcaccaggactgcaaggagtccccacaccttggcagctcagggtccccagtccaagcccttgacctctcctctatccagacccgcacagctgtttcctgtgtggatggggtcaggttgtgggccatgccaggcctgtcagctgcgttgactgactgcagcagcttgcctcatggttttccctttttcttagaatatttattcttcagaggtaacatgcagttgggtctcaagacctttcctccaatcagcccaacccagcccagactgggcttttctggggagctgaggagtttatcagtattcatcttccatcctttcatagtcacaagttttgttattttgtttttttttgggggtgatggtgtaattgttaacctcatttccgtttcctacctgtttgcttccccccccagtcctccgcatgagctgttgccctccaggggcctggcacagctggccttggggacgagggagaggactgattcagggccccctcagctgtctcctccctccctctggaaaggagggtggggctcaggggcctcaagctgggctctgtgtgaggcctggcccccactcccaaccttggctctagactgttactcttaagctttgagaaattttcacattgatgactattttaaaatcaaataaaactattttactggt

SEQ ID NO: 18703 - protein, 547 aa, Homo sapiens
MTSAAPAKKPYRKAPPEHRELRLEIPGSRLEQEEPLTDAERMKLLQEENEELRRRLASATRRTEALERELEIGQDCLELELGQSREELDKFKDKFRRLQNSYTASQRTNQELEDKLHTLIKKAEMDRKTLDWEIVELTNKLLDAKNTINKLEELNERYRLDCNPAVQLLKCNKSHFRNHKFADLPCELQDMVRKHLHSGQEAASPGPAPSLAPGAVVPTSVIARVLEKPESLLLNSAQSGSAGRPLAEDVFVHVDMSEGVPGDPASPPAPGSPTPQPNGECHSLGTARGSPEEELPLPAFEKLNPYPTPSPPHPLYPGRRVIEFSEDKVRIPRNSPLPNCTYATRQAISLSLVEEGSERARPSPVPSTPASAQASPHHQPSPAPLTLSAPASSASSEEDLLVSWQRAFVDRTPPPAAVAQRTAFGRDALPELQRHFAHSPADRDEVVQAPSARPEESELLLPTEPDSGFPREEEELNLPISPEEERQSLLPINRGTEEGPGTSHTEGRAWPLPSSSRPQRSPKRMGVHHLHRKDSLTQAQEQGNLLN

SEQ ID NO: 18704 - DNA, 2550 bp, Homo sapiens
  CDS (728)..(1054)
tttagcagtctgtgatgatcagcaaaaaagcacataaagtaaaaattagttgaccatgctaaattcaattctggaatttttttttatttgggcatttctagaactttttacatttgaaagtacatgatgagtattagtaacgatgacttatgtataatcagaatctttatgacaatttagttttacaaggtcaaaagagatgagtttgctaaacccagctgtgatacctcagttggaaagggaattcaaaggtatgctttgtagaacagaaaagtatagtttttttttcatgaactttaatcattttctgtttttcctctatgtgagtcagctacaaaagtggtctaatttttacaacagtagaacttcctccttttctactgtaatcttcccactgactttactgcacaggtatgaaatactagtgtattggatcttcagtaacctttttatttcctagatgattgaaatataggtatttactccatttaaaccaggtgataagatgatgtaaatactcagggagggtattaacttgttacttttgctcgtttggggtgtaaagtgccatgactgaataatcttcaattcatgattctagagtaagtttaatttggaaaaaggggcttcacacatggtggtggttgaacattgattcttttatacttaaaaagatgaaaatgttttgtggactgatacattttatcttactgaatatgaattgtttatgtatctctactgtcaaatagcctttttgaaactcaggaaagacaaaggttcaattacaccacttttgtcaataagcaaaccaggtattttttttttctcctgttgtctggatatggcaatagattttttaaattgctgtgagaacccatatatgaaaagagaggagttgaattgtgtgtgccttttatgtcttgagatttatatgtggaaaagacgacatctacttcaaactgtatttttttcgtttttttttttttttggggaaggggggagaacggggtcttgctctgtcgcccaggctggagtgcagtggcgcgatctcagctgactgcaacctccacctcccgggttcaagggattctgcctcagcctcccgagtagctgagaccacaggtgcgtgccaccacacccggctaatttttttgtatttttagtagagacggggtttagtagagacggatcactcctgaccacgtgatccgcccacctcggcctcccaaagtgctgggattacaggcgtgagccaccacccccggcctgtattttcagagaggagagcttggtgtttttgtggtgccaagtggtaagataatgtctctttgaggcttcctatggactgcctttattttagtaaactcaagacaccagttaacctcaacagagttttggccttattagaatttgttgtgcatcttattgaaagccaggtttacatcacctcaccccattattctttttagttaaataaatttaccatgccaagtaaccagaatggagcaaattggttgatctttaaggcagtaggtttgactagctagctatcattattgtcacatctaatgctaggcaccagaaaccatttgagccaggagtgtgaatgaataattccagagacactttagacattttttaatgttttatatgaacattttacatttgtgtgattgccttagatattaaattttcctagtgctgataaaaacagcaacattcataacttattttatatattgttccaaagaaaagaatttgttttaatggtttcaaaataactgcacctgaatttgtttatgtgccttaagttctctagtgctatttcaacttttttttcaatctaaatgaagcttaccttagataaggttcatatttgtttcctatagagtaaataaacttccccttcttaaattgtgtaataagcaccaacgtgtggttgcttggcagaatgagaatgttaagggagattgttggatgtttggagtttcattatattttttgtttttattttttgatacctaggtgctttttaaaatattcagacaaatatctatcttacattgattaaacccgtgtaaattcatttgcagtatctacatcgaatgtcaaaaaagtatacttatttttgttccatacttatgtacaattttttccctcttcaggctttttcatttacctttttgaaaaagcacttactctccccttccctatcacccctcccccaaggtttctttatttaaatttttattgagagttgttggagctctaagacaatacaaatttagagttgaacaaaagtataatctgctttacaactagtatagacctaaggtcatttgctttcaattagaggctccagagtcttcatagtggaaagaatgctttgtatttaattgttcttagttaagttgtagcacgtgaatacttacttacatgttttgtttaaatatacttcttgcatagtttaattttttaaaagttgtatctaataaaatgtcttttaaccattattacttgactatatggttgtattaaattttgtttacg

SEQ ID NO: 18705 - protein, 109 aa, Homo sapiens
MYLYCQIAFLKLRKDKGSITPLLSISKPGIFFFSCCLDMAIDFLNCCENPYMKREELNCVCLLCLEIYMWKRRHLLQTVFFSFFFFFGEGGRTGSCSVAQAGVQWRDLS

SEQ ID NO: 18706 - DNA, 2932 bp, Homo sapiens
acttaaatataagtttattctaactaatcccaatatgtggcctcaaaacataagtccataaatgtcatttctaagattattttacataaatactcaaatttgttgtcatttttgtagccaaagctaagtagaggatggggcctgtgaatttagaaccatcctagtgataaatatcaaatatttagataaaaacctaaatatttacccctctagctttatggagccattaaataataacatttttctccttctcttcatagagtttatagacaaaactagaaaattcaggtatttggtatatacttttttgttttttttgataccatcttggtcttgtcacccaggctgtagtgcagtggcgtgatctcggctcattgcaacctccgcttcccgggctcaagcgattcccctgtcccagcctcctaagtagctgggactacaggcacatgccaccacgcctggctaattttttgtatttttagtagagacggggtttcaccatgttggccaggttggtcttgatctcctgacctcatggtctgcccgcctcggcctccctaagtgttgggattatggctgtaagccatgtcatttcactctcttaatggtgtcttttggtgaaaagaagttcataatttcatgtagtccagtttatccattttgttttctatatgtttagcagttttttgtgtcctgtttagaaaatttttgcctattccaaaatcatgaaatttaagttctccacccctgttgaaattataatattaaggcagaaaagactcttcattctgatctgttggttcttagccttttgcaagtccaggatccctgtgaaaatctgactagaactctggacgccctgcacagaagtgcacctacgcacacacacagtagattttcctgcagtgttagggagttcacagacactcagacttaatctgtggaccccttgttagagaacccctcatctattccaacccagtcattttacagataaggaaattgaggcccagggaaaggccactgttagtttgtggcccacctggaactagagtccaggtctcttgactccgattctagtgctctttctaacagatttccctgctgcagtctttctgaaaatgtctcactggcagaaccatgaaagggagaatgttttagtcaagggagatttctgtccactagcagcaacaaaaaaaaaaaatggctacatggtgacactcttctactttatgtatttaccttaaatgtttaagatccaggaactgctttttgaagttgagctgggaattatcatggcccatgcatcctcctctagctgtgactcagtgccctggggttgctatatgaacctttccatgtataactacctgtattcggcttggtcttttggttggttctggctggaattttaaaaaccaccttatataataagcttctagtctcaatgctgaagtgggtggggtttaccagagtggttgctccagggagaaaattaaaaggggtggaggcagggaaaggaactctgagtttgttgactaggttatgttggtttgcaagtagtcagctggtagacaaacgaagccagagtgtctggaagtattcattaatgattttactgctcccctgccactgtctgcagtggtcttttccaaggctctaagtggactaagcagtttacaggtaacagggccagatattttcaagccatcactcaaaccccagtgctaggcatgtccagagcgaaacctgttaccttgtcggcatgctcaccaaagtgcactgccaggggtgtgcactttacactcatagcacagatcacagtttgtgtctcacagtgaaaaagactgttcatatctttgggccacaccctgaaacacaaactgaatgatcccaccctcaacacaaaggaagttgagtccataatcgcatccacagataggatactcttagatctgacaaataacacccatttattttattccctttttcttctttcccctaagcccccggagagcctttctccagtttcatcacacactcctgactaagtagatgggggtgctggggggccagctctccgaatgaggcacatttgtcttgtcatttcaaaagctttcacagagcacctgctgtgttctgggtcctgtactaggtgacagggccacctaggtgaacagggcaaggtccctgtcctcaggaagctcccagtccaggcagaggcgtgggtgaatcggccctcacgtactgcacagtgtgttgagtgagcacagatgctgtggggccaccctgtgggtccagggaagcacttcctagagaagaaatccaaacagggattccaagtcaacgaggcagaaagtgatgggaacagcatttgtcatagtcagacaggtgcctttcacagtgacatagagacagtgaggtggggttggaatttaggcctgagagaacggggacccagtggcatacagagtcttatccttgtcctacccttttgaaagagctaaattcagaggctgccaatatgttcataactcaaaaggatcacttatcccaataacttaggaaccgttggcatccatagccctaaatcggaaaatgccgaaatcagaatcatttccccctacattgatcacagtgacctttaatcaccttcagctccctggtctcctagagccacgggtcagcccctcactgccctcctccaaagacaagtctgctcagaatgtcactgaaactctgagcatccactcaacaagcctccatcttcttactttctcatcttttctcttttaggcctgaagaagtcagtgatttatagttcactaaaactgcacaaaatgtggaaagggtggctgaggaaaacatcctgattttgcttgcttttatatatgttatgtgtagatgaataaagtgtttgatcctttttgac

SEQ ID NO: 18707 - DNA, 3612 bp, Homo sapiens
ctttcacttcagggagtctgaattagatgcgcttcttcccattcctccctctaattacaacaagcttggacgttacatacagaacaaacagaaggagtctctgaaagatgaagagaaggcaagtaagctacagacttcacaatgtaaggaataatatggtggtgagttacatttgtgatttttttttgtctcatatcccataatatctcatatctcataatcagttagaaagcacaatggaaaagtattccactgccaatggtgttagagaactgctcacaaattcaacagaaatgcacagataccaaagcagaaaggacaataaacaagagtcttcatggtcaaaagattagaagctgcagctttcaatgggagggacaggttctggaccacactgcagtgcttttctgctttctgtgctttcccactctagagctgaagaaggtaacgaccccaaaatgtcaatatacgtagaccaaaaaccagccccaataaaagtctgctctctctagccaaaggactacagtagggcagcccagcaagacagaaaaccttcagacaacctaccccagccaaacactaccaaaaaaagtaaagtgagccatcacccaatccacatcagtaaaaactaagtggaaagtccagactttcacctcaagaggttgcgacaagctactccaatacccctgctgggatagtgtcacagaaggctaaataaggagctgtaatgttgattcccctccagaagtaaagagtccgtacctgctattttcagagagaccacatggaaagcctagatttcaacacctacccagcattaatgaggtattccttcccttctttactctctggtgtcaaagaagctccatgcagagtcagaatgtttggcattactcctcagtagggaggccacccccaccacggtgttagtggagaccatgtgaggaccaggacttgtaccctgcccagaagtaatgagtagacccccctctacaggaaggccaaagggcaacctaaacttctacctctctctggcagtaataaagtagggcctcacttttccctgctgagcaatgtcaaaaaaaaaaagccagctgaagtaaaagcttatttctttctttctttatacatatttttggagacagggtcttattctgtcacccacgctggagtacagtggcctcatcaggtctcactgcagcctcaacctcctgggctcaagcaatcctcccacctcagcctcttgagtagctgagaccacagatgtgcaccaccacacatagctaacattaacattttttctagagatggggtcttcctgtgttgcccaggctggtctggaactcctgggctcaagtgatcctcccaccttgacctcctggagggctgggattacaggtatgagtcatcactccaggctgaagctttatataataaccagagtctcatattacaaaatgtcaaagattcagtcaaaagttacttgatatcaatggacaactcaaactaaatgaaaaaaagacaattaatagatgctaacactgagataacaaagttgttagaatcatctaacaaagattttaaagcagctataataaaagtgctactgcaagtgattataaacatgcttgagacaaatgaaaaagtgctataaagctaagaaataaaatatataaataagaatcaaagagaagttatagaactaaaagataccataactgaaatgcaaagctccgtggatggactcaacaacagaatggaaaagactgaggaaagaagtagtttacaggaaattagaatagactagaaaaaatgaacaagaccctgtgctgaagagcaaatatttatgtcattggattccaggaaagagaaaagaatgaaaaagtacttaaataatggcttaaaaacttctcacattttgcaaagatttaaacctacaatttgagaagctgggtaaaccttaaacaggataaatcaaggacactcacaccaagaaacatagtaattaaacttctgattaaggaaaaaaaagaaaaatctggaaagcagcaagaaaaaaatgacacactttctatatggtaaaagcaatttgaacaacagaagatttctcatcagaaactgtggggaccatgaggaagtaacagatatttttcaagtgctgaaataaatcaactgtcaatacaaaatgctctactcagtgaaaatatctttcaggaataaaggggaaatcaggacacgcacagactttttttaaattaagaatttattgtcagcttatctccctaaaagaatggctaacattctccaaacaagaaggaaattgataaggaatcttgaaatttcagttagaaacaatgaatatggcaagcaaaatgtaggtcagtacactaagtttaatttctcctcttgaattttctaaattatgacttatgattgaagcaaaaatcataacattatctgatgtatatgtagaggaaagatttaagacagtgatgttataaatgaggggagtaaaggaacatgagataaccactaatatgacataccaatagactatgataaattatgtgtctaatgtgattactagaaaaaccagttaaaatataaagattgacggagtgaatttaaaaacatgacacactatatgctgtttatcataaactcactttgaagataatgccatcgtcaggttgaaatcaaaaggaataaaatagtgtattatgtaaaccatcaaaaagagcaggaatggccatattaataacattaaagtcagcttcagaactaaggaaattatcagagagggacattatataatgaaatagtcgatttaccaaaagaacatagcaatcataaatatgcatgaagcaaacaacaaagctggaaaatatatgaagtgaaactgatagatctaaaaggagaaacagataaatccattcattatagttggggcctttatcacccctcactcaacaattgatagaactggacagaaaaccagtaagaatataaaagaactcaacaacatgagacaataggatctagttgatatttatagaacattccaacagcagaatacatgttcttcaagtgctcacagaacacacatataaagatagaccctgagcataaaacaagcctcaacaaatttaaaagaactgaaatactacaagtactttctccaaccacaaaagaaccaaactagaaataaataacaatgataatgggaaaatcaccaaacacttgaaaactgaacaacaatattttataacccatggtcatagaggaaatctcaaaagaaattttaaaaatgcactgaactgaatgaaaatgaaaacaacataaaatttgtgagacacataaagcagaactgatgggaaaatatatagcactaaatgcatgctctagaaaagaaaagtcttcaaccagtaacctaagcttccacctcaaaaacctaaaaaaagaaggaaaaatagacccaatgccagcagaaagatgcaataacaaagagtagaactcaatgaaattgaaaacagataaacactttaaagaataaaacaaagagctggttattagaaaagatcaattaattgataaacctcaagcaagaccgtc

SEQ ID NO: 18708 - DNA, 2449 bp, Homo sapiens
  CDS (367)..(837)
agaaaagcgccggacgccggggtgatcatggacgcttgacaacctgcgggcaggcgccgggaggccgagccagcgactaagaggaccgagaggtggcgtggacagatttcaaggccagagaatggcaggggaacagaaaccctcaagtaatctcctggagcagtttattttactagccaaaggtaccagtggctcagccctcactgctctcataagccaggtcttagaggctcccggagtgtatgtctttggagaacttctggagctggccaacgtgcaggagccaacaaggagagcctgccagaactgagcacagctcagcagaacaagctgaagcatcttaccatcgtgagcttggcatcaagaatgaagtgtatcccctactccgtgttgctgaaagacctggagatgcggaatctccgggaactagaagaccttatcattgaggctgtctacactgacatcatccagggcaagctggaccagcgaaaccagctgctggaagtggatttctgcattggccgtgacatccgaaagaaggatatcaataatattgtcaagaccctgcatgaatggtgtgatggctgtgaagcagttctactgggcatcgagcagcaagttctgagagccaaccagtacaaagagaaccacaaccgaactcagcagcaggtagaagcagaggttaccaacatcaagaagacactcaaagccaccgcatcctcctcggctcaggagatggagcagcagctggctgaacgggagtgtccccctcacgctgagcagaggcagcccaccaagaagatgtccaaagtgaaaggtctggtctccagccgccactagggccggctggggcagctggcactcaccaggcctgggtcaggtggggaggggacaccaagggcccatttcctcccctctctacctgcagtgagttccagacctgcccgtcccctcaccagcgcctccccaccctgttggtactgttccagaaaaactgttactccccctcacccactccctccttccccagttgttcccttcagactcaggggctccaccaatgccatcccaaaacagggtcagacactgcccagcttccctccaggaggttcttgtctctgtgtaagggcttgtctccctcccagtttttcttttgctccacgtcattttgtcaggctggttataagccggaggcagctttaaccagcccccagggatgattgtgaaggaggcccctccccttgtgaggagggggcactcctctccagcccctggtaccacagtcctcacgatggtgcagtgatttctagccaggcgtcaagatgcgctgctttccctctcctgcctcatcccttgttggcagctccagttcaggccgtggagggacgtgatgctgggctgtgtttactaaacccacgggttttcagcctcttaagcccagctccgatctccaattagttgagagcgctgggttgactaacctctggtatctgagcacagacagagggtgctgtgggtctgctgggtggcagaaatggttccttccggcttggcgttctctcctggccactcttcctgctgcctctgactactcagccttgttttcggtgtgtaggccccagctgcccactggaactgccggctaatgcttgctctcccaagatctttaactcctcctggctgcacctgggtagggatggtggcatcgatgcccctctgtctgctgaaggacctgttgctgcttctgtcttttcacccctccttggctgatgacccagagccctctgatgatggcattctcctggcaagagaaaaagacttaactagacttctgaacttgaacagtttcaggttatattttaatttttttttttttgtacaggttctgattctaatacatttcaacatgcttttgtcccccctcgtgtcaatatttgttatagactaatcgccggggatttttcacctggttggagggtgggggtggggtgtgtgtgtgtgtgtgtgtgtgtgtgtgtgtgtgtgtgtgtgtgtgtgtgtgtgtttgtaggtcctggactgattaaagttcattgaggaaaaagcacattttacaacaaaaaaataaaagtgtagatttaatgtatgtgactggggtttggggttgcatacctggtggatcttgaggggccgggattagggtggttcaggaaaatgtgatgctgtttccccatgtttagccatggtcaaaaaatggatttctcctttttctaaaatgtccagcaactgcctactgttgatcaaatgttgaagtattcttgtttcccttttaagccaatccatgtgcccacataacattatgcccaagtggagagttcactttaatttccaaagtatgtttcatgcagccccctgtcagctgctctgtggaaaaggggttctgttatgaaataaatgttgcactccctgc

SEQ ID NO: 18709 - protein, 157 aa, Homo sapiens
MKCIPYSVLLKDLEMRNLRELEDLIIEAVYTDIIQGKLDQRNQLLEVDFCIGRDIRKKDINNIVKTLHEWCDGCEAVLLGIEQQVLRANQYKENHNRTQQQVEAEVTNIKKTLKATASSSAQEMEQQLAERECPPHAEQRQPTKKMSKVKGLVSSRH

SEQ ID NO: 18710 - DNA, 3198 bp, Homo sapiens
  CDS (29)..(2233)
ttcgaataaaagtggagcctggaaaataatgggttttgatttttgtgtatcatcaaccaatccttctgaacaagagcctaaatttccttgtaaagaatgggacccaaatttaccttcattgtgtcttccaaatcctgaatatttggctcctgaatacatactttctgtgagctgtgaaacagccagtgatatgtattctttaggaactgttatgtatgctgtatttaataaagggaaacctatatttgaagtcaacaagcaagatatttacaagagtttcagtaggcagttggatcagttgagtcgtttaggatctagttcacttacaaatatacctgaggaagttcgtgaacatgtaaagctactgttaaatgtaactccgactgtaagaccagatgcagatcaaatgacaaagattcccttctttgatgatgttggtgcagtaacactgcaatattttgataccttattccaaagagataatcttcagaaatcacagtttttcaaaggactgctaaaggttctaccaaaactgcccaagcgtgtcattgtgcagagaattttgccttgtttgacttcagaatttgtaaaccctgacatggtaccttttgttttgcccaatgtcctacttattgctgaggaatgcaccaaagaagaatatgtcaaattaattcttcctgaacttggccctgtgtttaagcagcaggagccaatccagattttgttaattttcctacaaaaaatggatttgctactaaccagaacccctcctgatgagataaagaacagtgttctacccatggtttacagagcactagaagctccttccattcagatccaggagctctgtctaaacatcattccaacctttgcaaatcttatagactacccatccatgaaaaacgctttgataccaagaattaaaaatgcttgtctacaaacatcttcccttgcggttcgtgtaaattcattagtgtgcttaggaaagattttggaatacttggataagtggttcgtacttgatgatatcctacccttcttacaacaaattccatccaaggaacctgcggtcctcatgggaattttaggtatttacaaatgtacttttactcataagaagttgggaatcaccaaagagcagctggccggaaaagtgttgcctcatcttattcccctgagtattgaaaacaatcttaatcttaatcagttcaattctttcatttccgtcataaaagaaatgcttaatagattggagtctgaacataagactaaactggagcaacttcatataatgcaagaacagcagaaatctttggatataggaaatcgaatgaatgtttctgaggagatgaaagttacaaatattgggaatcagcaaattgacaaagtttttaacaacattggagcagaccttctgactggcagtgagtccgaaaataaagaggacgggttacagaataaacataaaagagcatcacttacacttgaagaaaaacaaaaattagcaaaagaacaagagcaggcacagaagctgaaaagccagcagcctcttaaaccccaagtgcacacacctgttgctactgttaaacagactaaggacttgacagacacactgatggataatatgtcatccttgaccagcctttctgttagtacccctaaatcttctgcttcaagtactttcacttctgttccttccatgggcattggtatgatgttttctacaccaactgataatacaaagagaaatttgacaaatggcctaaatgccaatatgggctttcagacttcaggattcaacatgcccgttaatacaaaccagaacttctacagtagtccaagcacagttggagtgaccaagatgactctgggaacacctcccactttgccaaacttcaatgctttgagtgttcctcctgctggtgcaaagcagacccaacaaagacccacagatatgtctgcccttaataatctctttggccctcagaaacccaaagttagcatgaaccagttatcacaacagaaaccaaatcagtggcttaatcagtttgtacctcctcaaggttctccaactatgggcagttcagtaatggggacacagatgaacgtgataggacaatctgcttttggtatgcagggtaatcctttctttaacccacagaactttgcacagccaccaactactatgaccaatagcagttcagctagcaatgatttaaaagatctttttgggtgaggtgtcttacttctattttgaaggattatttcagtttcaatcatgggtgagctgatttacatctttatatagttggcttggaggaagtacttctatgggaaagtgaacagttctgtgacaggaaacatctctgtccatgccagcatagtagttgtatggacttctaaccagttgagttttttaaagcattgaggattttttcctcttaccaactcctcttcaggtttttaaagacccagcccttcccaatctcaaagagaaaaaggaaactgagttatcttgaataacataactttttaatcaaatgtttattttggcttgtggatcttggtgttatttaaaaaattgaggtgatggtcattgcaagctcatctattaagtactatatggtacacagtctatgagtcattagtcttcattttaatatgtaaaaaatcttgatgctgtattgatttgtttgcatttaagatgacagtgagaaaatgataagcataaagagaagtatcaggttatttgctttttccaaacttttcagatgaactattgtttagtacagagactgagcaaatactacaaaattcaacttaaccttcatttcattggtttaaatgcgttattaaccatcttaagtgcaaactaatcattgtaaattatattttagcatggtctgcctcaaatagtaatgtatttttctgcattcacttggatatatttagaatcacttttttcctcctgtatcaaggaagaggtatgtgctgatttgtttggatatttgacaaggcactctgatgtgacttccctgactactaccttcatatttcatttcaaattcaaacttctgaggttgcagcatatatgaattgcattttcaaaagaagatttgtaagaattaaactatatttatgagtaaacttttgaggtttctgctgtattgtttcaaatgtaataaactttacttctgt

SEQ ID NO: 18711 - protein, 735 aa, Homo sapiens [sequence omitted]

SEQ ID NO: 18712 - DNA, 3071 bp, Homo sapiens
  CDS (120)..(839)
agatctcccgttgtgtgagagaaacgcaagcacggagctcccttgacctgctgcatcctcctcggcaattttttttttttaagtcaaaaagcttggatttcctgaaattgttgaactggatgcggctgttgaagagtgaacttggatcattcattacagactattttcagaaccagcttcttgcaaaaggactgttctttgtggaggagaagatcaagctgtgtgaaggtgaaaatcgcattgaggttctggctgaagtctgggaccacttcttcactgagactctccctaccctgcaggcaatattttatccagttcagagtgttcacgagcccacaggcccaagtgagagttatttgcaactggaggagctggtgaagcaagtggtttctcctttcctcggcatcagcggggaccgtagcttctcaggccccacgtacacgctggccaggcggcactccagggtccggcccaaggtgactgtcctgaactatgcctccccgataaccgcagtcagccggccactgaatgagatggtcttgaccccactgacagagcaggagggggaagcctacctggagaagtgtggcagcgtgcggcggcacacggtggccaatgcccactcggacatccagctgctggccatggccaccatgatgcactcgggcctgggggaggaggccagcagtgagaacaagtgcctgctcctgccacccagcttccccccgccccaccggcagtgctccagtgagcccaacatcaccgacaaccctgacggactggaggagggggccaggggcagccaggagggctcggagctgaactgtgcttccctcagctgagtcgccacccctgggcctttccatctcctgttttgcaaccaggatgaggacccctccatctccgtggattactgaggggggctcttgctttatgcgatgctgccttatttcctttagggtactgtcctggtcaaaatgacctaaggggaaaccgttgttgtaaacctctttattttggtgactgtgaccacttctttgtagccaccaattgtagtgaccagttgcctaatggtcactttctgactccagccttgccagcctgactcagatcctcatctctgggcctttctccctccgatgttggactgcccgatgctcccaatgacgtatccaatgctcctggcatttctggagcaggaggttgtcaggacaacacatataaccaccaaggatgtgttggcctttggagttcccctttaggttcctagtgatgtggaggtttatgggtgaaaaattagtggagagggaactcctctcccccattttgtgtagagtgaaaatagcctgaagcccctactcagcagggctctgggaatgtgccttccttattttagtttcagaattgctgggaaagttaccccactggtgggtgaggatctatcctcaacctacatccagatcctatgtgctgcttgcacagaggcctttggcttttgacccaggagggccgcgaggctggagctgccctgtctttcattgagccttagcatttccctctcaggcttcctctcaagctcaaggaactcacccccagataagaagctggtgcctcttgtctctctcatttcagaaacggactttctcatcatgctttcctatggtgggtatgaggggccagctgataccaaccaactggcctgtatctatctatctggatttgacttgaatttttaaaatgtgtatcgtttaaaaaaaaaaatgtttgcaaattttgcacataggatcttgcactgttcattttcagtggggtgagtcttcacactaaaaacacaagcagagctcctgggaaaagagactggaagtggttcaggataaagagatccatggtgggcagggctcttaggtcacagagctctagaagcagctggacttgaacccacaatggcttgtgtaaattcgtaaatttcatggtttctaggaaaagctgcactggggtggggagacccagtttgcctcataggcagaggattctccaggaagcatggaaaatggaatgtttccatgctttacagtgctgggagagaggggagatgtgggcaggaccttttggaaggatgtttattctctgtggttaaagaaatgctgagaatttctagcatgtgaagcacttgggggcagcaggccttggcacggtgctgcatccttctactgctccctccaggtctgggggcttttatccaccttgaatccctatcctcctctttgtagttgtcggtctcactgataacagctccagaaaaaaagacaaggctccccctctgacccttcctgttggtatttatgaaatctcaaagagatgagccaccttggcttccaatatggcaagagggtgctgggagaaggtgaagatcagtctaagctgccacggtgatgagaccttctcattatttaactcttgatggcatttcccttctgagtgaagatttgaaatatgattgattagaattgtgctcttgatggctgggaatttagaaattttattttaagagttatttcattttcatcctaagagtgatgggagagaaatgtccaaaagagatctgctgatctgctgagaatttcaaacaaacaaaaaaataatctctatgtatgtgttggataaagtctacagactgactaacatgcattagcaaatggagcatcagtaggtagcaacatgataatttatgtaactgatagcttctgtccttattagtacacttaacatttgagactagtatttattgatccaggcaaagtaattaattaatcatgcttgggcttactttttcagtttgtaaggttaagcatatgtgcatgcatgcgtgtgtatataaatgccttttccatatcttaaatgtccctgatgaggagagcagtcatcaattaaatatataagctcttaaaatgagaatggaagtgtcagtatagacccattgtacttaagtgctgatgactgttagccagtttacaactttttaccatcgatgtacacatttgatatttgtgcagtaaatagactgtacctat

SEQ ID NO: 18713 - protein, 240 aa, Homo sapiens
MRLLKSELGSFITDYFQNQLLAKGLFFVEEKIKLCEGENRIEVLAEVWDHFFTETLPTLQAIFYPVQSVHEPTGPSESYLQLEELVKQVVSPFLGISGDRSFSGPTYTLARRHSRVRPKVTVLNYASPITAVSRPLNEMVLTPLTEQEGEAYLEKCGSVRRHTVANAHSDIQLLAMATMMHSGLGEEASSENKCLLLPPSFPPPHRQCSSEPNITDNPDGLEEGARGSQEGSELNCASLS

SEQ ID NO: 18714 - DNA, 2407 bp, Homo sapiens
  CDS (69)..(407)
acagcaagttgtattcattccattcatctagaattcctaggctgcctttgtcgggcctgcaggtattaatggagaatagcagctttttatttttttatatttattttttgagacagagtctcactctgttgcccaggctggagtgcaatggcgcgatctcagctcactgcagcctccgcctcagaggttcaagtgattctcctgcctcagcctctggaatagctgggactacaggcacctgccaccacacccagctaactttttgtatttttagagaagatggggtttcatcatgttggccaagctggtctcaaactcctgatctcagtgatccatctgcctcagcctcccaaagttataagatttttttcctctggtttttagtaaatgttttttttgagattgcttagcaccagaatgatttgcaaatttgaaaataggaactccactaggaatgccggatagaagagtgcttcacatttgtagagggagacaagaactaaatatcacgacgtctttctgagccttttggtttgctaacgtgccccaaattcttattccaaacggtataagataattatgtgtaaatgaataccagctctacttagttttatttcatatttgtgtatctgaatatattaaaatatctttttttttttttttgatgcggagtcttgctctgttgtccagcctggagtgcagtggcatgatctcggctcactgcaacctctgcctcccaggttcaagcgattctcctgcctcagcctcctaagtagctggtattacaggagtgtgccattagcctggctaatttttgtatttttagtagagatggattttcattgtgttggccatgctggtcttgaactcctgacctcaagtgatcctcctgccttggcctcccaaagtactgtgattactatcatgagccaccacacctggcctaaaagatcattgatttagttttgagtaagattttaagtgattaaattatggtattgttgtgtctggaatatctgatattagggtttttttttttttttttttacagtttttgatatgctttattttgggtatgtagtttacaaaatataaaggaaatataaggagtgttctcttttttttttaaataaaaagtgtatttttaactgggcatggtggctcactcctgtaaccccagcactgtgggaggctgaggctggtgaatcgcctgagtccaggagtttgagaccagcctgggcaacaaggtgaaaccctgtttctatcaaaaaaaaaaaaaaaaaaaaaaggaaaaaaaataagtcaggcatggtggtatgcacctgtagtcccagctacttgaaggctgaggcaggaggatcgcttgtgcctggggggttgaagctacagtgagctatggtcaagctactgcactccattataggcaaccctatctcaaaaaagcaaagcaaaacaaaacatttttccccttgattatagaggtttgagaaaaatttgagggaagattcagaaaattacctgtaactgaacagaatgccaccagcttgggcttattctgcatgcataattatgaacattttcccagctcttgtgaaaattctcacattcatagaaagatagatgcaccagtaaaataaatacctgtaaatacgataataatttcataataatatgcttcacctagatttaccagttactaatattttgccagttttattttctcacacacttttgttgagcatctgaaaaccatacacatgatgacagttcaacccataatgttttagtttgcatctcccaagaataaggtttttcttctgtataacaagaatattgtaatcatacctaagaaaatgaattttattacatatgtgttctatattcaaatttctgtaattacccctaagatgtcttttaaatgatttttagcattgatagtctgtgcctgtgtagattataacattggctattgcaaaataatggttttctttttctctttttttttgagacgaaatcttgctctattgtccaagctggagggcagtggcacaatctcggctcactgcaacctccgcctcccaggttcaagcagttctcatgcttcaccctcctgagtagctgggattacaggcaggtgccactgtgctctgctaatttttatatttttagtagagacggagtttcatcgagctggccagactggtcttgaactcctgacctcaagtgatccacctgcctcgtcctcccaaagtgctggggttacaggtgtgagccactgcacccagcctaaaatgatggttttctgattctagcatttcttttataagattgctatgtaaagcacagcttttctttttttagggaaaaatgtcttttaacagctgcaaaataaatattctttcaatgg

SEQ ID NO: 18715 - protein, 113 aa, Homo sapiens [sequence omitted]

SEQ ID NO: 18716 - DNA, 3419 bp, Homo sapiens
  CDS (1594)..(2541)
aggagacctaggtaccagactttgctttgccagtgcctctttctgtggccttgggtaagtttttcccctctctgggcctcagtttcccatttgcaaaataaaagtgtttaagactaggttccaagattttccaattctaatgctgagaggatacagaggaaaacagaaagaatgctggctgaggaaccaggagacttgccttcttgtcccagctctgccactgacctgacctctttgggcctctgcttcctcatctataaaataagataaagcaacagaagcctccagcgactaagttaaactttcctggggtcacaaggtttacaagtggctgaataggatttctacagactggttccttcacccggctgcccgccgaagtaagcgggccttactgccctaattctcaataggaccccaaagaggacgcttctttgctcctgaagggatggcaccctttggattcgcggtaacagcaaatggggctctcactcctaccatctcagtgacagtttaaagcgcaccctaccgcaggaaagtgcccatatttgcacacacgcggcagagggcagggctgaaaaggggccctagggtgcagggggcgcgccctcacccggggaccccgcattttacaatattagctccaccgaggcgcacggaaccgcaggcgagcaactgaccttcggctccagcggccccaaagccgggggtgggaacgcgcgacccaggtagcggcatggactccgagcctggcccctcgggggttaaaactccccagacataaaggctccggacgacagaggtgcagccgccgcgtgcccgtgggacactgaaactcttcccttaccttcctcggtagtcctgtgagggaggctggcccggccggctgccctacggtgcggacaggaggtcgcggtcgggaggggccctgcccggcggttgctgctggaaccagcccccgcaagggcccgcagcggccgggccgtttacctcagacccgcgccgcagcctcccggagcccgcgcccaggactccctcacgacctctccagggtcccggcccgacaccaaggggcaggtgaggggtggaacctggaggcacccgcgccagggcccctgagggaggcgggagggggacagcctcagtcctgactcgcagccgaggcgcgacgactccgcgcagtcccgcctgtggaggggcgtgcctcatcgcttgctaaccgagaggcgaagggcaaggggcgaagggcaagcgccggatcctttcgccccctccccacgtgaggccctggaggctgattggccgtgtgctgcggaggcggcaagaggaacgtgtcctggcacgtgccgaaggagcgctaaaggccaggggcggtcccacccgcgaagccctggaaggcggattggctgcgcgaggaagtggcgtgtcctcacttgagctgtctgggagcgagagtaagagataaaggcaagggcgcctgagcgggcctgggcacctcctcccactgcgggcaaagggcaggcagttcgtgcgcggacacaagcactggcggaccgtggccatggcgggcgctgagtggaagtcgctggaggaatgcttggagaagcacctgccgctccccgacttgcaggaagtgaagcgcgttctctatggcaaggaactcaggtctctgcccttcatagacgcataaaggctatcgtagaggtggctgcaatgtgtggagtcaacatcatctgtttccaggaagcatggactatgccctttgccttctgtacgagagagaagcttccttggacagaatttgctgagtcagcagaggatgggcccaccaccagattctgtcagaagctggcgaagaaccatgacatggtggtggtgtctcccatcctggaacgagacagcgagcatggggatgttttgtggaatacagccgtggtgatctccaattccggagcagtcctgggaaagaccaggaaaaaccacatccccagagtgggtgatttcaacgagtcaacttactacatggagggaaacctgggccaccccgtgttccagacgcagttcggaaggatcgcggtgaacatttgctacgggcggcaccaccccctcaactggcttatgtacagcatcaacggggctgagatcatcttcaacccctcggccacgataggagcactcagcgagtccctgtggcccatcgaggccagaaacgcagccattgccaatcactgcttcacctgcgccatcaatcgagtgggcaccgagcacttcccgaacgagtttacctcgggagatggaaagaaagctcaccaggactttggctacttttatggctcgagctatgtggcagcccctgacagcagccggactcctgggctgtcccgtagccgggatggactgctagttgctaagctcgacctaaacctctgccagcaggtgaatgatgtctggaacttcaagatgacgggcaggtatgagatgtacgcacgggagctcgccgaagctgtcaagtccatctacagccccaccatcgtgaaagagtagccggcttcagtgcctgccttggggtgaggaagacacctctgccccagtggattagcaagtgtggcaggcttaacatgtccaggttctccccaataacattgtccaggttggttttaaaattcccaggcagggggagagtggcatggggagtgacttcttaatgggtaaggggctgcttacttctggggtattggaaatgtttggggactaggtagaggtgaatgtactaaatgccactgaatttgtatacttcagaatgtttgttatgtaaattttacctcaactaaaaaaaaaaaatgcccaggtactgcttgtgcaggtggatttgaggttaggcagatgatgctgtccatcccgtacaccagtgggaagagggtgagggctgatccagagaccctgagcctacagcaaggctgtggtgggtcggatggtctttggatgtgtcagcttagctaggccacagtcaccagtaattcaatcagacactaatctaggtatttctgtgaaggtattttgtagatgtgacagaagtccattcccaattgactaagtaagtgagattatctcagataatctgggtcagcctgacctgattagtcagaaggcctaaagaacagagctaagggtttccctgaggaagaaattctgcctgaggacagcagcccagtgcttggcgagagttcctgacagtctgcccttctgatagcctgcctcacagagtttagacatgactggccagctcctacaatcactgaagtcaattccttgcaataaatctcaatatatcccctactggttctgcttctctagttgaatctgactgatacagattttggtgccaaaagtggttctagaaaaatagaatcttaaagatg

SEQ ID NO: 18717 - protein, 316 aa, Homo sapiens [sequence omitted]

SEQ ID NO: 18718 - DNA, 3219 bp, Homo sapiens
taggaggaagagagagatggaaccatgtaaccaccacgaccaagaggccagtaaccaccagagctccagcaaatactttaggaaatgattttgacttggctgatgccctggatgatcgaaatgatcgagatgatggccgcaggaaaccaattgctggaggaggaggtttttcagacaaggatcttgaagacatagtagggggtggagaatacaaacctgacaagggtaaaggtgatggccggtacggcagcaatgacgaccctggatctggcatggtggcagagcctggcaccattgccggggtggccagcgccctggccatggccctcatcggtgccgtctccagctacatctcctaccagcagaagaagttctgcttcagcattcagcagggtctcaacgcagactacgtgaagggagagaacctggaagccgtggtatgtgaggaaccccaagtgaaatactccacgttgcacacgcagtctgcagagccgccgccgccgcccgaaccagcccggatctgagggccctgtccagctgcaggcatgcacaatggtgccaccgcttgtcacccggctccccccaccccttcatttggacccgcagctgctgtgctgctctgtgccatcggctccttgttggtctgagtttcccggatgagctctgggtgtttgtgagtttggtttctctgccctgccccaagcgtgctgagacttggtgccgaaattcaagagccagctctgatagaaagccagcaccagcctcgggagctgctgagccaccaactcccaaagccagcctgcctccagctttactgagcacaggatgcgggggccaagatgatgctgaggcctgatgacatttatgcttaggggacaagagtttgaactcaagggactgtgacccctgcacactggagtggctcattgtggcaggtttctgccaatagacagcccctgacagtggcctcaaggagctgcaggtggggggctcagcctgcacccacttggagcccctgcaaggagcgaaccggtcagcaccaagtaacaccacacacacgcagcacccaggatgatggtttcacttcagtcttccccatcccaggttttatgttgctgggcttccggagagccggtccaagcggaggctttcagtgatttaagtacaaacacgcatctcgtgatagtcctgccttgagagcttaggaatcttccggataagtatgaagcaattcgtaggcctgtttcccatctgattccatagggggctgggtgtggccttccggttgacatgagaaaggtctttagcaatcatttctgcaccggagatgagttttatcctgtgttggggagaggtgctcaccctccaccctgtgtccctgttttggtagcaagagtgaccgatgtcaagaacgagcatcaaagccagaatcctgcttgtttgcttaaaaatgtaattgggggcggcgggggaggagaggggaaagagacattcgcttggtttagtgaaacgcaggtgactttgtagctctgtggtcagcctacttgtctgctctgagggagagtgcgtggggagccatgctcaccgtggcaaacacaggaaccccatgactcgcccctcacctggcgtggagctgcctggtttgggctggagcagagctggtttcctggaatgttcctttggcccacatatggttctgtcccggtgagctctgttgtcagaggctcacgggacagaaccacatgctagggtctagggcccctgtctactgatagtcagtttgctgtgtcagaaagcacttctgaaagcagatatgagtcaccagacaggcaggatcttacaaaactcacgggcctctttggtctgcatgatggccccatgcgtttcataggctgtccactgagcgggattgtctgctgagtgggattagccaactccagtttcttaaggaaaccactggaatctgcagcccccacatgcatctgtctaacgcatgcctcgtgttcgttttgcaaacatgcctgtggtggagggtggtcagttgtagccctgtgcgtctcaaggctgccttgtgaggccattcccagtgcgtgcccttgagctccttaccaccccttttcctgctcggccctttaatccctgacagacctggactgtgtggctgaagggggacctgcagcactgcagaaatgcctctgcgtggtgccatgaaggaaagaaaccttggcctggtctcgagaagcttcccatgcttcaggaagttagtaagggtggggtggcttgcaggattggcctgtttccagggcctcccacactcattggccagattgtgaactttgtcaggcttgtccctccctgataccaagtatgtcgagaaccgatggccccaccctctggctggtgctgggccggaggtggctatggaggattttggcatgcgtggcctgtcgccacctggacagcgtgacctcaggggttgtccactttacctttatggtgaggcctgtcggatggctaagtccttgaaaccctagagctgtgacgtagaatatgtgctgtctgtgagaccgtgttcccaggagcactgactgcagttgagagagacccattttgctctcccttaccgccccccgccccgggtgctttctgcacaaagcctagagcctggcactcaagcccaccggtggcagctcctagtgactggacatgcctggaagacccctcagccttctgtttgcagaacgttcatttcaggagcttctccttcccacagacatcttacacttgctcgacactgccacctgcagaagcctggcgggctctggtcaccatgtgtctatctgaaggttgcactggccagcatgggcctgtcccaagcgagaggggagacacagtggactgaaaggactggttgaaagtggccaatctctgtcagcttaatttggcagagaaaatttgtaacaactctgagcacatgctgggtgaagtcacagctcaaggaaagataaagctgggcggaaggaggtgtgcgtggcttctggggtgggacccagaggggaggctctgggacaggggctggggttcagtgccagggccctgaggaagaaatggggactgatctcaaaattccagaattccctgtacatctgttcacgtgcttgtgtccaggtgtgacttgtaaactgtctagtgtttgcattaaataaaatggcaccgagc

SEQ ID NO: 18719 - DNA, 2083 bp, Homo sapiens
  CDS (196)..(1503)
gcgcaggcgtaccgggtgccccggctctggagcataaacaagagcggggacgggatgaggcggcggttgatcccagggtggcgagtggcggcgaccgaggcggcgagcggggcccggcgccgaccctgagtgcagcctgacccgccctcgcgcgcgcgccctccccggccgggcccactcgccgcgcgcccagccatgaacctggcgagccagagcggggaggccggcgccggccagctgctcttcgccaacttcaaccaggacaacacgtccctagctgttggtagtaagtccggttataaatttttctccctttcttctgtggataagctggaacagatctatgaatgcaccgatacggaagatgtgtgcattgtagagagattgttctccagcagcctagtggccatcgtgagccttaaagcaccaaggaagctaaaggtttgccactttaagaagggaactgagatctgcaactacagctactccaacacgattctggctgtgaagctcaacaggcagaggctgatagtatgcctggaggagtccctgtacatccacaacattcgggacatgaaggtgctgcatacgatcagggagacgcctccaaaccctgcaggcctgtgtgcgctgtcaatcaacaacgacaactgctacttggcgtacccagggagcgcgaccatcggagaggtgcaggtcttcgataccattaatttgagagctgcaaacatgattccggctcacgacagtcctttagcggcactggcctttgacgcaagtggaactaaacttgccacggcttcggagaaggggaccgtgattagggtattttccattccagagggacaaaaactctttgagtttcggagaggagtaaagaggtgcgtgagcatctgctccctggccttcagcatggacggcatgttcctctccgcctccagcaacactgagaccgtgcacatcttcaaactcgagactgtgaaagaaaaacccccagaggagcccaccacctggaccgggtacttcgggaaagtgctcatggcctccaccagctacctgccttcccaagtgacagaaatgttcaaccagggcagagccttcgccacggtccgcctgccattctgcggccacaaaaacatctgctcgctagccacaattcagaagatcccgcggttgttggtgggtgccgccgacgggtacctgtacatgtacaacctggacccccaggagggcggcgagtgtgccctgatgaagcagcaccggctggacggcagtctggaaacgaccaatgagatcttggactctgcctctcacgactgccccttagtcactcagacatacggcgcagctgcaggaaaaggtacttacgtgccttcatccccaacgagacttgcctacacagacgacctgggtgctgtgggtggcgcctgcctggaggacgaggccagcgccctgcgcctggatgaggacagcgagcacccgcccatgattcttcggactgactgaacttgacctgtgacctctgacccggggagcagagaacactggcttcacagaggactttgtgcattgctgctatgaactttgacctgagtcgggggagaggatggcagagactttattaaaaaaaaaaaaagattgtagtggtagtctaactccataacgctgaggaaatacatcattttcacttcagtggcttttaaatcctgcttatgaattttagctttttgtttgtttgttttctctttttgccaaaattaactgtttggtgaagcccgcaaaacctcctcgctttgcatgcatgaacgtgccaagccagcataggggagctagaagccactttccagccacctgccgttgggttttttcatatctgtacataatgccgagtgcgtaaggaaaccgtggcgtcgcgcacagtgggtctgcttgtcaaggccagttctgcagtgacaggcccaggggctgcccaccaggtgtgctgggcagacttcagctgggacagaagtccgatctccctagggccccacctggaccattttccctccgttttattttgttaattaaattctttccaaattgg

SEQ ID NO: 18720 - protein, 436 aa, Homo sapiens
MNLASQSGEAGAGQLLFANFNQDNTSLAVGSKSGYKFFSLSSVDKLEQIYECTDTEDVCIVERLFSSSLVAIVSLKAPRKLKVCHFKKGTEICNYSYSNTILAVKLNRQRLIVCLEESLYIHNIRDMKVLHTIRETPPNPAGLCALSINNDNCYLAYPGSATIGEVQVFDTINLRAANMIPAHDSPLAALAFDASGTKLATASEKGTVIRVFSIPEGQKLFEFRRGVKRCVSICSLAFSMDGMFLSASSNTETVHIFKLETVKEKPPEEPTTWTGYFGKVLMASTSYLPSQVTEMFNQGRAFATVRLPFCGHKNICSLATIQKIPRLLVGAADGYLYMYNLDPQEGGECALMKQHRLDGSLETTNEILDSASHDCPLVTQTYGAAAGKGTYVPSSPTRLAYTDDLGAVGGACLEDEASALRLDEDSEHPPMILRTD

SEQ ID NO: 18721 - DNA, 4514 bp, Homo sapiens
  CDS (1058)..(2425)
gaagttctagaaaatgttaattgggggagctgtggctggcagagaaggaaaaaggaagctgaagggcacttgggctcataatggtctctccaaccctgatcctgtcctttatggacatttggcagcgctgctgccttgaggtgccttgcaatgctttatctttttgttaaagccacctctgttgcttcagccagcttgagcggttttctgttacttgctagtggttgggaaggcttagccgacgaagggaaaatgagtcaggtcctgaaggatgagcaagttacgggagtgggccgcatggtgagggagtggacttcctgatggggttaagggcgcctgaacacctgggaggcaagttgaggccaagacctggggtgatggagaggcagggtaggctacccagtgagtaggaggccgaaggaaccacagcagggctccagatctcctggcccagaggggctggtacgggaagcccagaagacactcatccctaaggggagcctgagactgaggaactctcatgccctgcgtcgggctcgtgggcgaagggccttcccagggactgcaccatggcctgtccccagccttacccaggggcctccctctcaggttctgaaggacccaggggtcacagctgtgtggggtgctccactgaacacttccttcaaactccttcaggctggagtgcagtggcgcgatctcagctccatgggagagagtttgaaaggatgaagagtttacatcctctggaaagaagcaaatagaaggcattccaggcaaaaggaactgcatcgagtaaaagcatggaggcaagaaagggcttggtgtgtttgagaaacagtgagtagggcatggtggtggcagaagcttaaagtgtatggcccgtggacagtgacagccggacaagaagctgaagtgacagaacaagttgaaccaaaggaattccagacctgggaaagtggagaaagaattttggggtcagagccgtttaagactttgcctagggcctgggtcttctttctcctaaaggcctcaacccacagcacgccacacaaatatgtcacataacacacaaacaaacatcatatttcacagtccaggaaatgaaatgaagacaaaagcgccccctgtgggtgaagtcacagtcactgcagcagacatcatggctgtggatgtggcagaataccatctgagcgtcatcaagagcccccctggctgggaggtgggtgtctatgctgcaggggccctggccctgctgggaatcgcagctgtgagcctgtggaagctctggacgtcggggagcttccccagcccctctccgttccccaattacgactacaggtaccttcagcagaagtacggcgagagctgcgcagaggccagggagaagagagtgcctgcctggaatgcccagcgggccagcacgcggggaccacccagccgcaaaggcagtctcagcattgaggacacctttgagagcatcagtgaactggggcctctggagctgatgggccgggagttggacctggccccctatgggaccctccggaagtcccagtcggccgactccctgaactccatctcctccgtgagcaacacctttgggcaggacttcacactgggccaggtggaggtgagcatggagtacgacactgcctcccacacgctgaacgtggcggtgatgcagggcaaggacctcctggagcgggaggaggccagcttcgagtcctgcttcatgcgcgtcagcctgctgccggacgagcagatcgtgggcatttctcggatccagagaaatgcctactccatcttctttgatgagaagttctccatccccctggatcccacagccctggaggagaagagcctgcggttttctgtatttggcatcgatgaggatgagcgcaacgtcagcacgggggtggtggagctgaagctttctgtgcttgacctcccgctgcagcccttcagtggctggctctatttacaggaccagaacaaggccgccgatgctgtgggggagatcctgctctccctcagctacctccccacagccgagcgcctcaccgtggtcgtggttaaggccaagaacctcatctggaccaacgacaagaccacagcggaccccttcgtcaaggtgtacctgctgcaggatgggaggaagatgagcaaaaagaagacagccgtgaagagggatgaccccaacccggtgttcaacgaagccatgatcttctcggtgccagccattgtgctccaggacctgtctctccgcgtgacggtggctgagagcagcagcgacggccgtggggacaacgtgggccatgtcatcattgggccgtcagccagtggcatgggaaccacacattggaaccagatgttggccacgctgcgcaggcccgtgtccatgtggcacgctgtccggcgaaactagcaaccagggcgggccagttgggcaatggagctgctggagcccggtacccactcagctctgtctgatgccctctccatagcccagctggagccgtgaacactggggtcccctggcagagtcctcatgacccatcctggtctctctgtccagattgcagcagaggagtgggcgtggctctgtgtccagggccccagggtctgctcctgctgaggaccagctgtggctgggccaggacagaggactcaaccctgctcctcccggtaggccagctgccgagctgggctatgttctggaacccagtgaatcttgggggccaggcactgtgctaggcaccagcaggggtaacacaaagaagacccggcccttagggcatcaggaagactagctcccctgccccggaggatctgctcagtgctgatggcagcccagctgtgtggactcagggggctctgagggctagggaaacaggaagggcctctttgacaaggtaggagctgtgcttggaggggcaggaaaagaactgagcatgtcgcaggcagcgggcccagcctgagcaatggcaggatgtgaacttccccatcgcaaatgcagttctcagcccactgcagtggatacaaggaagggcctttctcggggccggagaagagaccaagagaccaggcccgggcagcagcctaccggccacgtggaacactggctccggagttattctctgtcaaatctactccccggacctcaaccatggcaagaaccagaggtccaaagaggcccagacccaggtccttgtgctcagtcctgcgcaaaccaggcccagaccctgcaagcatttgttgatgcccttgcaggcccactgggagaaagatgcctcaggcaggtctcagcctgggggtggcaggggtggggcagagagaatactgacagcagaggtcttggtgggctgcacgtgcctgcgaagatgtggtggacaaggaggctctcgggctgggccttggaggggtggcagcggaaggacagcccaggtggctgaggcctgatgggaagccggggaaggccagggtggaagggcggcttgagggacgccaggagaagactgaatgccaggctaggaaggaggcggctctcgatcacggggtgggtgcccccgacaccgggtctcctagcttgagttccctagaagcgaaatctgagagggggattctggggcaagtagtttcttgcgggtgagtgttctcagagaaacttaccagatcaagaaagggagctcaggctggatggaggaagccacgcaagtgtggcttcaagatccatcgccttggcctgatcgctgtgggggcaggggcctggagtacgaggggcaccctgggggctcccacccagaagcagaggggctgggctgttgcacctctactggcatcagtctttggttaccccccagccccagtaggaggagagcaggcagagcttgtcatccccagcctggtgtcccgcagtcccaggaagccgcttcttgccttcatggctgagtgctgggaagggctgagctcacccaggccagcaggtggggtatcatctgctcggtggggccacccacaggtgacagcatggaccctcaggctggctgcccctgttccttggtccataactggtgagctatggagacccaggccaacaaattatccccagtgatatggggggaggaggggctagaacaagggcccaggggactggaggcaggatggtggctttccctacctgacacagccatggcccagccccaaggccaggctgtctaccctatggccacagcaggaggtcagcccagggccaggagacacatggctggacaaggctttgcagcctgggagaccccgactttctctaacccagtggctgtgcggtgcaggccactgactccccccctgccctctcccctctctccctccccctaactgcatgacatgttaactgtgtgcccaggacagccgtggtgggaaccgggtatgccaactggaatgattctagaaccaaaataaagttggggcaggaagagggggcttccagggagccctgctcggccctgaatcac

SEQ ID NO: 18722 - protein, 456 aa, Homo sapiens
MSHNTQTNIIFHSPGNEMKTKAPPVGEVTVTAADIMAVDVAEYHLSVIKSPPGWEVGVYAAGALALLGIAAVSLWKLWTSGSFPSPSPFPNYDYRYLQQKYGESCAEAREKRVPAWNAQRASTRGPPSRKGSLSIEDTFESISELGPLELMGRELDLAPYGTLRKSQSADSLNSISSVSNTFGQDFTLGQVEVSMEYDTASHTLNVAVMQGKDLLEREEASFESCFMRVSLLPDEQIVGISRIQRNAYSIFFDEKFSIPLDPTALEEKSLRFSVFGIDEDERNVSTGVVELKLSVLDLPLQPFSGWLYLQDQNKAADAVGEILLSLSYLPTAERLTVVVVKAKNLIWTNDKTTADPFVKVYLLQDGRKMSKKKTAVKRDDPNPVFNEAMIFSVPAIVLQDLSLRVTVAESSSDGRGDNVGHVIIGPSASGMGTTHWNQMLATLRRPVSMWHAVRRN

SEQ ID NO: 18723 - DNA, 3299 bp, Homo sapiens
  CDS (502)..(1254)
acttccccctcccccctcccttcctctctcctcccttttccctcctttccttgtctccttcttcttcctcttctttcccccagcccccctcctccctgtccccctctctccctgctccacgcagtgtcccactgcccgcctttctctgcagctggctggtatggagggggctgccctgaggagccccagagtaagctggaagggaggggacagaggctggtgtcatttgtctctgtagccctaggaccggtctgaaccggttgctgggagaggaggagggggcggccagatcgattgcagcaaagagggaagagagcggcagagggagctcgcggggcttgcgtgctggaacacgccgatggcctgtgccaccgcctcaccaccgtgtgccccacgtccaagccgcagactcagggcctggccaaggatgcctgggagatccctcgggagtcgctgcggctggaggtcaagctgggccagggctgctttggcgaggtgtggatggggacctggaacggtaccaccagggtggccatcaaaaccctgaagcctggcacgatgtctccagaggccttcctgcaggaggcccaggtcatgaagaagctgaggcatgagaagctggtgcagttgtatgctgtggtttcagaggagcccatttacatcgtcacggagtacatgagcaaggggagtttgctggactttctcaagggggagacaggcaagtacctgcggctgcctcagctggtggacatggctgctcagatcgcctcaggcatggcgtacgtggagcggatgaactacgtccaccgggaccttcgtgcagccaacatcctggtgggagagaacctggtgtgcaaagtggccgactttgggctggctcggctcattgaagacaatgagtacacggcgcggcaaggtgccaaattccccatcaagtggacggctccagaagctgccctctatggccgcttcaccatcaagtcggacgtgtggtccttcgggatcctgctgactgagctcaccacaaagggacgggtgccctaccctgggatggtgaaccgcgaggtgctggaccaggtggagcggggctaccggatgccctgcccgccggagtgtcccgagtccctgcacgacctcatgtgccagtgctggcggaaggagcctgaggagcggcccaccttcgagtacctgcaggccttcctggaggactacttcacgtccaccgagccccagtaccagcccggggagaacctctaggcacaggcgggcccagaccggcttctcggcttggatcctgggctgggtggcccctgtctcggggcttgccccactctgcctgcctgctgttggtcctctctctgtggggctgaattgccaggggcgaggcccttcctctttggtggcatggaaggggcttctggacctagggtggcctgagagggcggtgggtatgcgagaccagcacggtgactctgtccagctcccgctgtggccgcacgcctctccctgcactccctcctggagctctgtgggtctctggaagaggaaccaggagaagggctggggccggggctgagggtgcccttttccagcctcagcctactccgctcactgaactccttccccacttctgtgccacccccggtctatgtcgagagctggccaaagagcctttccaaagaggagcgatgggcccctggccccgcctgcctgccaccctgccccttgccatccattctggaaacacctgtaggcagaggctgccgagacagaccctctgccgctgcttccaggctgggcagcacaaggccttgcctggcctgatgatggtgggtgggtgggatgagtaccccctcaaaccctgccctccttagacctgagggacccttcgagatcatcacttccttgcccccatttcacccatggggagacagttgagagcggggatgtgacatgcccaaggccacggagcagttcagagtggaggcgggcttggaacccggtgctccctctgtcatcctcaggaaccaacaattcgtcggaggcatcatggaaagactgggacagcccaggaaacaaggggtctgaggatgcattcgagatggcagattcccactgccgctgcccgctcagcccagctgttgggaacagcatggaggcagatgtggggctgagctggggaatcagggtaaaaggtgcaggtgtggagagagaggcttcaatcggcttgtgggtgatgtttgaccttcagagccagccggctatgaaagggagcgagcccctcggctctggaggcaatcaagcagacatagaagagccaagagtccaggaggccctggtcctggcctccttccccgtactttgtcctgtggcatttcaattcctggccctgttctcctccccaagtcggcaccctttaactcatgaggagggaaaagagtgcctaagcgggggtgaaagaggacgtgttacccactgccatgcaccaggactggctgtgtaaccttgggtggcccctgctgtctctctgggctgcagagtctgccccacatgtggccatggcctctgcaactgctcagctctggtccaggccctgtggcaggacacacatggtgagcctagccctgggacatcaggagactgggctctggctctgttcggcctttgggtgtgtggtggattctccctgggcctcagtgtgcccatctgtaaaggggcagctgacagtttgtggcatcttgccaagggtccctgtgtgtgtgtatgtgtgtgcatgtgtgcgtgtctccatgtgcgtccatatttaacatgtaaaaatgtcccccccgctccgtcccccaaacatgttgtacatttcaccatggccccctcatcatagcaataacattcccactgccaggggttcttgagccagccaggccctgccagtggggaaggaggccaagcagtgcctgcctatgaaatttcaacttttcctttcatacgtctttattacccaagtcttctcccgtccattccagtcaaatctgggctcactcaccccagcgagctctcaaatccctctccaactgcctaaggccctttgtgtaaggtgtcttaatactgtccttttttttttttaacagtgttttgtagatttcagatgactatgcagaggcctgggggacccctggctctgggccgggcctggggctccgaaattccaaggcccagacttgcggggggtgggggggtatccagaattggttgtaaatactttgcatattgtctgattaaacacaaacagacctcagaatctg

SEQ ID NO: 18724 - protein, 251 aa, Homo sapiens
MGTWNGTTRVAIKTLKPGTMSPEAFLQEAQVMKKLRHEKLVQLYAVVSEEPIYIVTEYMSKGSLLDFLKGETGKYLRLPQLVDMAAQIASGMAYVERMNYVHRDLRAANILVGENLVCKVADFGLARLIEDNEYTARQGAKFPIKWTAPEAALYGRFTIKSDVWSFGILLTELTTKGRVPYPGMVNREVLDQVERGYRMPCPPECPESLHDLMCQCWRKEPEERPTFEYLQAFLEDYFTSTEPQYQPGENL

SEQ ID NO: 18725 - DNA, 2437 bp, Homo sapiens
  CDS (634)..(1407)
agacactggccgcgggccaccatctggacgcgatcccccgctagggcctccctggtctgggccaaagttggtggccaccttcgcgcgggctgcgccctccttctcttccctgccctcctcccccggggcccgcgcccgctgcctccagcacgcgcgtcggcaggctcggcaagcgaagaggagcggctcgccccagggcgcccctcgcccagcctgccggccaggcgagcgcgacgagagtctccccgcaccccttcctctcccgggggccgagagggttgggctccgccccggcgccgcagctcccgactccccgccgctcgggctgccgccgctgccccgcgcccggcgctcggggcagccgggggcgcaggcggagagcgcagggcggggagaggcgtggggagcagagcggcgctgaggggagggcagaggaggagagagcctggcagcggaggagcagaggcgggcgccgcaccgccccgcacgctcgctcgctcgggagagtcgcgggcggccgcttgggcgcacttgccgggtcaccttgtcccggaggagaaatggcttccctgaggcaagtgtaacctacattcccagcccaccagcctgacgcccagccagggagagagtaccatggatggcatcattgaacagaagagcatgctggtgcacagtaaaatcagtgatgctggcaagaggaatggtttaattaacaccagaaacttgatggccgagagcagagatggtctggtgtctgtttacccagcgccccagtaccagagccaccgggtgggggccagcacagtgccggccagcctggacagcagcaggagtgagccgatgcagcagctgctggaccccaacaccctgcagcagtcagtggagtcccgctaccggcccaacatcatcctctattcagagggcgtgctgcgctcctggggggacggtgtggccgccgactgctgcgagaccaccttcatcgaggaccggtcgcccaccaaagacagcctcgagtacccggatgggaagttcattgacctctcagctgatgacataaaaatccacaccctgtcctacgatgtggaggaggaggaggagttccaggagctggagagcgactactcaagcgacacagagagtgaggacaatttcctcatgatgcccccgcgggaccacctgggcctcagtgtcttctccatgctctgctgcttctggcctctgggcatcgcagccttctacttgtcccatgagaccaacaaagccgtggccaagggggacttgcaccaggccagcaccagctcccggcgggccctattcctggcagtgctgtccatcaccattgggactggcgtctatgtgggcgtggccgtggccctcatcgcctacctctccaagaacaaccacctgtgagcttcctgcgaatggagggggagcacccggggccaggtctgtgtggacgtggaggaagcaggcataccgcatgatgctgtacagtacaaatgattgccaaatgatgccacgaagccctgggatttcctacccatggatttattttgtttttatcctttaatttcatgttcacagcactgtgtagagcaccagacagacgggcactgctaatccttccaaaggaaagctccaaagatcccagcccgcaaggctgtctctggatggattctggtggatgaatggcaacgcggctctctgcagcctgccagtgcccagagtgccaccgcattagcaatatacaaacagtccaaaaaagtgtttattttttatggaatacggtgcaataggcagaggacaagggacacatcactcttctgtctgtggccctgctggagtcctttgtgccccccggagtccacacgccttccctgcaagacgagaatggggctgggaagaaagaggcaacaccacggctggcaggagccccgctgcactgctctgcagacccattggcctgaccctgagaagcagagccagcaaagcccgggacctgcccctctttctttcccttcacaccaccccagcctcaggatgtcaagccacctccggaacgtgtctacactccacagctaccccgcagcaatacgcactcttgggacctcgctgatctaggatggggaggcaggccaccgcccctcccaagactcctcaagaaagagccccgcggttgctccggaaactcgaggcactgcagctatgggcactgcctcagcctaaagacacaggggcgcctcccaatcaccgcgctggcggatgctcaccccgtcataagcagaaactagtgatcctggaaatgagatgggccttactctgtcgactaaatgaatagctattttcttgtcattttttaaagtgcaactcttgcttcatgctgcttaagttaccagatgaatgctgagaaataagtaatcacagacattttaatacc

SEQ ID NO: 18726 - protein, 258 aa, Homo sapiens
MDGIIEQKSMLVHSKISDAGKRNGLINTRNLMAESRDGLVSVYPAPQYQSHRVGASTVPASLDSSRSEPMQQLLDPNTLQQSVESRYRPNIILYSEGVLRSWGDGVAADCCETTFIEDRSPTKDSLEYPDGKFIDLSADDIKIHTLSYDVEEEEEFQELESDYSSDTESEDNFLMMPPRDHLGLSVFSMLCCFWPLGIAAFYLSHETNKAVAKGDLHQASTSSRRALFLAVLSITIGTGVYVGVAVALIAYLSKNNHL

SEQ ID NO: 18727 - DNA, 3203 bp, Homo sapiens
gcaaaaatatgaaccaagagaaattcaataagagcctttcatagaggagtagaaaggattattacagaatccaatgaatgccaagaaaatgtacagcaaatgtgccacttgaatatctagtatgaagctggtaatgaagaaattgccatttctgaagcagatatgaaatatgatctgcttaattgttaaggcaactgacctttcaaaagtgcagagtcttattaaaagaggggaggggtagaagcagaataatagtcatatgtctaacctgccccagttaactcctcttgttaaattataagccagttatcttttttagatagtatttttgtcacttggataatcacaggaaatatataagaaaagagcttggactaacttgagaagttggacatggaaagcaagaccaagttccagttgggtttaattttccctcttggttattttcggacacaaagggaatgcttaaaactgagtttagtaataaaaagcataaatctcttctgtaacttttataaaccacagggaggtttcaatccatgcattttccttcattactcaagattataaatctgtttttaaaatacatctaaacaaacagttgagaaacaaaagtttggcatgttgtcagatccccttaagaggaagaggttaagctgtaaagtagtggccctgttttgatgccagaacattcatatgctgtttgttctggatttcttttaaatgcatgtattttaaatactggttaaatcttagaatcttggctatatcttagaattctggctcttggtaaccatattacagaagtctatattgtaaaagcctaaagatctggacaagtttccaacaaccttgtttccatgagtatataattttggcagacacctgaattctttgggacactgtgtctgtgtatgtgtgtgtgtgtgtgtgtgtgtgtgcgcttgtatcttgaagttgttgcacttcaaaaccacagctgctgtaaattcttaaacactggagagccatcctttggtttaaatggtagagggttactggaagtgcacacgttgtttttagcccaggggtagtaacaaactcttactagccaactaaaaaattattttgttgacgagatgtcccttttaggagggtttgtttcctgaaagaatgccaactttttttgttgttctttcagtattggcttgagtgacctgttctcctgagtgctctagtgtctccagttgtgggggggaaagatgatggaggggaacagaaactggacttgatgtttgcggtttgagaggcaagaaaataaaataactttctacctctaaattgaggcttaggagtaaaaagcattttgtcctaaatttatcatttaaaatagcatcagtaacttttgagctcatgtcaatcaagcattggcagtcagagattttatagggaagactaagtaaatccagtttccaagaacctaaactgattgaggctccaagagtcagaccaacaaaagttttattctgtgttgtttactggtaagaatattattatcttgatactacctctcaagggtattgttacaaaatgccacttatggttaaagagatagatacaaagagttctatttgacagaagcttgaaactctggcatctatctgcccaacgatgggggctttcgttctgtaatttaatcctttgtagatacattatttgtgtgtaattttatacgtgttcatatttttctcattttgcattgtgtaaagtgtacaaaatctcaaagtataaaatactgcttatattgcttgtaatttacagtgtgtaaatattttctaattgtgtacattgatgggggggacaagtgggttattcaggttttttttaatgacccttttgtattgcagtttcaacagataactgtccatcaaatttaaaaccactttgatacatttttatttaacagttccaataagaaaaaaatctctatttttaattatatttctcctttagaaaaaaaatacttcatggtccctctaaaataaatggccagacctcagtttaggcccttgtatttatgactctggtagaggtcttcagactccaggtcatagtccagtcagtatttgcatttgggttctcatgaaaactttgtgactctcttttagcacaagtagcccatggtttttcttccaaatcaagtattttacttctcccttgagtccccatgctttgtctccttcctgctgctattgcccggtgaatgggatggtagagagggagaaatgttcattgcacagagaatgtcaggccactttggggacttggcaaacgaagcttgcactgagtggtggtgtgtttggcaatattactgtgccaaaaatcaccttgtctaattttgtggatatgtatggcaaacttattacccttcttgcaagctgcacattaaggtacttgtaagtgtttatgcttttgtgtgtaactgtttgccttttctaactgcttttcttgttactgaaaatataattctactagttttatcacattaagaggctctccatgcacaaaatgcattgatgtagccgtaaagtaacagcatttgtacattttctatctcctgatggcagtggtgcctttgtcaccttttggaaggtttgcattttgtttctgctttcaagcgcaaatagtagcttgctttcagcttcacaaaaatctcctcaaatgtaaaagatacaaaatggcgtgttatcatccaggcttagttggagtatttgcatttttatttttatcaaaacaaatataattggtggggactggccagtaataatgtgtggcgtctttaagccaagagtaatttttaaattaaaaatgaaaattttaagaggtagcccattaaacaagctactgagttggagaattaggggatgactgtggtggtttgtcgctaaggaggcaacagtagggtccaggcggcggggcacgtagagcagttagcatgatccatggttattccttactcatgaacagtgtcggcgcacctcattatctgtgcatttgtttttcctgggcagtcctgtcagccagttaatccaccagctcttaggaagtaaatacagatttttttctttccttttttttttttttaaagattttatactacatcttgttaaagtcctatgaatgtgtgtgtgtgtgtgctattaaaactgctttttctcagtttg

SEQ ID NO: 18728 - DNA, 2753 bp, Homo sapiens
  CDS (14)..(2260)
tcgggttggtgtcatggcagctgcggggagccgcaagaggcgcctggcggagctgacggtggacgagttcctagcttcgggctttgactccgagtccgaatccgaatccgaaaattctccacaagcggagacacgggaagcacgcgaggctgcccggagtccggataagccgggcgggagcccctcggccagccggcgtaaaggccgtgcctctgagcacaaagaccagctctctcggctgaaggacagagaccccgagttctacaagttcctgcaggagaatgaccagagcctgctaaacttcagcgactcggacagctctgaggaggaagaggggccgttccactccctgccagatgtgctggaggaagccagtgaggaggaggatggagcggaggaaggagaagatggggacagagtccccagagggctgaaggggaagaagaattctgttcctgtgaccgtcgccatggttgagagatggaagcaggcagcaaagcaacgcctcactccaaagctgttccatgaagtggtacaggcgttccgagcagctgtggccaccacccgaggggaccaggaaagtgctgaggccaacaaattccaggtcacggacagtgctgcattcaatgctctggttaccttctgcatcagagacctcattggctgtctccagaagctgctgtttggaaaggtggcaaaggatagcagcaggatgctgcagccgtccagcagcccgctctgggggaagcttcgtgtggacatcaaggcttacctgggctcggccatacagctggtgtcctgtctgtcggagacgacggtgttggcggccgtgctgcggcacatcagcgtgctggtgccctgcttcctgaccttccccaagcagtgccgcatgctgctcaagagaatggtggtcgtatggagcactggggaggagtctctgcgggtgctggctttcctggtcctcagcagagtctgccggcacaagaaggacactttccttggccccgtcctcaagcaaatgtacatcacgtatgtgaggaactgcaagttcacctcgcctggtgccctccccttcatcagtttcatgcagtggaccttgacggagctgctggccctggagccgggtgtggcctaccagcacgccttcctctacatccgccagctcgccatacacctgcgcaacgccatgaccacccgcaagaaggaaacataccagtctgtgtacaactggcagtatgtgcactgcctcttcctgtggtgccgggtcctgagcactgcgggccccagcgaagccctccagcccttggtctacccccttgcccaagtcatcattggctgtatcaagctcatccccactgcccgcttctacccgctgcgaatgcactgcatccgtgccctgacgctgctctcggggagctcgggggccttcatcccggtgctgcctttcatcctggagatgttccagcaggtcgacttcaacaggaagccagggcgcatgagctccaagcccatcaacttctccgtgatcctgaagctgtccaatgtcaacctgcaggagaaggcgtaccgggacggcctggtggagcagctgtacgacctcaccctggagtacctgcacagccaggcacactgcatcggcttcccggagctggtgctgcctgtggtcctgcagctgaagtcgttcctccgggagtgcaaggtggccaactactgccggcaggtgcagcagctgcttgggaaggttcaggagaactcggcatacatctgcagccgccgccagagggtttccttcggcgtctctgagcagcaggcagtggaagcctgggagaagctgacccgggaagaggggacacccttgaccttgtactacagccactggcgcaagctgcgtgaccgggagatccagctggagatcagtggcaaagagcggctggaagacctgaacttccctgagatcaaacgaaggaagatggctgacaggaaggatgaggacaggaagcaatttaaagacctctttgacctgaacagctctgaagaggacgacatcgagggattctcggagagagggatactgaggcccctgagcactcggcatggggtggaagacgatgaagaggacgaggaggagggcgaggaggacagcagcaactcggaggatggagacccagacgcagaggcggggctggcccctggggagctgcagcagctggcccaggggccggaggacgagctggaggatctgcagctctcagaggacgactgaggcagcccatctggggggcctgtaggggctgccgggctggtggccagtgtttccacctccctggcagtcaggcctagaggctggcgtctgtgcagttgggggaggcagtagacacgggacaggctttattatttatttttcagcatgaaagaccaaacgtatcgagagctgggctgggctgggctggtgtggctgctgaagccccacagctgtgggctgctgaagtcagctccgcgggggagctgaccctgacgtcagcagaccgagaccagtcccagttccagggggaggcctgcaggcccctggccccttccaccacctctgccctccgtctgcagacctcgtccatctgcaccaggctctgccttcactcccccaagtctttggaaatttgttcttttcctttgaagtcacattttcttttaaaattttttgttttgcatccgaaaccgaaagaaataaagcggtgggaggcagggccattgtgttg

SEQ ID NO: 18729 - protein, 749 aa, Homo sapiens [sequence omitted]

SEQ ID NO: 18730 - DNA, 2174 bp, Homo sapiens
  CDS (70)..(1284)
cttatatgtgaaaagtctataggtacttgtaatagacctttgggcgctggggaggccttgagacgagtaatggagtgtttggcatctggaatactacttcctgggggtcctggtcttcatgatccttgtgagcgagacccaacagatgctctgagctatatgaccatccagcaaaaagaagatattacccacagtgcacagcatgcactcagactatcagcctttggccagatttacaaagtgctggagatggacccccttccatctagtaagccttttcagaagtattcctggtcagttactgataaagaaggtgctgggtcttcagctctaaagaggccatttgaagatggattaggggatgataaagaccccaacaagaagatgaaacgaaacttaaggaaaattctggatagtaaagcaatagaccttatgaatgcactaatgaggctaaatcagatcaggcctgggcttcagtataagctcctatctcagtctggccccgttcatgccccagtcttcacaatgtctgtagatgtggatggcacaacatatgaagcctcaggaccatccaagaaaacagcaaaacttcacgtagcggtgaaggtattgcaggcaatgggatatccaacaggctttgatgcagatattgaatgtatgagttccgatgaaaaatcagataatgaaagtaaaaatgaaacagtgtcttcaaactcaagcaataatactggaaattctacaactgaaacctccagtaccttagaggtaagaactcagggccctatcctcacagcaagtggcaaaaaccctgtaatggagctcaatgaaaaaagaagaggtctcaagtatgaactcatctcagagactggtggaagccatgacaagcgctttgtaatggaggtagaagtagatggacagaaattcagaggcgcaggtccaaataagaaagtggcaaaggcgagtgcagctttagctgccttggagaaactgttttctggacccaatgcggcaaataataagaaaaagaagattatccctcaggcaaagggcgttgtgaatacagctgtgtctgcagcagtccaagctgttcggggcagaggaagaggaactctaacaaggggagcttttgttggggcgacagctgctcctggctacatagctccaggctatggaacaccatatggttacagcacagctgcccctgcctatggtttacccaagagaatggttctgttacccgttatgaaatttccaacatatcctgttccccactactcattcttttagcaaatgacagaagctaattcctattgaacaacaatacagtacaacacagaatgttagagaaaaagcctttttatcctgctttctttgaacacatacttgatcaaaattatttgtaaagaacatctttcctactttttgattttaacaaatgcaaatttagttctctaaaacttgaaaaaaaaaaaaagaaaccagttctgtgaaaacggtacctcatttctggaaaataacttataccagcccttctgttctagggaaataaaagtctagcagttcaaagtttaagttttaagagacgtatcagattatgtaaaattaaatttgtgaaggatgtatagagtctcaaacactgatcacaaataaactgctttgttgtaacacagagtactgcctggttcctgatgcagtcactgattcttagttgattgatatgtatttgccccagggcactttaatttgggctgtagttattttttttaatacaatagagacttttcatttaactttaactttgtaaatattgaagtgtgtaataaagccaataaaatatgggtttgaatattgttttagcttattatttttgatatgttttggtatcaaattacaaggaattgaaaactaataacttagccctagaagcccattcacttgtaagcaaagtgctaaaacaaagcaaaggtgattgttagtttgagccagtctactcactttgtaagccctttgtactcctgttgtacaagggccatccccatgataaaggttccattctgttatttgagcattgcttattaaaatgatggcactacccagagatggggaaggagaatgtgattatcctagtttatgaatttccaagtttttaaaaataataaattaatcaatcaatc

SEQ ID NO: 18731 - protein, 405 aa, Homo sapiens
MECLASGILLPGGPGLHDPCERDPTDALSYMTIQQKEDITHSAQHALRLSAFGQIYKVLEMDPLPSSKPFQKYSWSVTDKEGAGSSALKRPFEDGLGDDKDPNKKMKRNLRKILDSKAIDLMNALMRLNQIRPGLQYKLLSQSGPVHAPVFTMSVDVDGTTYEASGPSKKTAKLHVAVKVLQAMGYPTGFDADIECMSSDEKSDNESKNETVSSNSSNNTGNSTTETSSTLEVRTQGPILTASGKNPVMELNEKRRGLKYELISETGGSHDKRFVMEVEVDGQKFRGAGPNKKVAKASAALAALEKLFSGPNAANNKKKKIIPQAKGVVNTAVSAAVQAVRGRGRGTLTRGAFVGATAAPGYIAPGYGTPYGYSTAAPAYGLPKRMVLLPVMKFPTYPVPHYSFF

SEQ ID NO: 18732 - DNA, 3210 bp, Homo sapiens
  CDS (1683)..(1988)
tttttttaaggtccagtgacttttcacatgaaagaaatgcattctggacttccattaggatacgagaatcattacaatccattccatattgcttaatgagcatcataaacttcttacaatgagggtaaggtttctcatgatcctctgaagctgtttcagagggccgagttaagtcatcaggttcatctctaaatgagtttgctttttgacctttttcttttcatttgacattttctttgcaggcctagcatactctttgttctccttcctaggaaatcgctgatggtaagtttttccactctttctttgttgaattaatttatcatcatcgtcagcagatgtactatcatatacgtttttttgatactttttttttttaactttcgtgcttctttctagcttcttcaacctgtggctgtttattttcactttcaagcttttcctgttcttcctctgatgtcacttgtacttcttgttctgctttggatgtttgttcgttcttcctttctattgctttcttcacaacagaatctttcatttccatggtaggctttagggaaggatgtttttcaggaggcccttctccctttccatttactatatattttttccttttttatatgaaggtccaagtaaagactttgaaacactctcagggatacactgcttggtagtaaaagtcaagtcttcatcatctggtttaggccatgagtcaacacacagtttttttttaatactgaatgcagatgcttcagaactcccagaatcttttgcacttgctcctcctgttttcaaacttgcattcttcttggatgcttcttctgggttgtcattttgaagaccattttcaagtatcttttttttttttaatgttgcaaaatttgttgtgagtgcttgtcagaccaccagaaatagcataatctgcagtctgttcatacatactcttgagtaaagacaatattttgttgaagaagaatgctaactatacctgacaagccataatgtacaacaggcatgagagctgttcttttcaacctatcaacagcatgtacatttgcttgtttcttcactaaaattccaccttttgctgtgttttgcaaactatagcaagtaaaagtggtgtgtttgcatccttgttcagcacttcagtatccttgttcagcacttcagtattcacatggtgtgagggcagtttttctgccagtagtgtattctcattatacacagcatagtgtagtgcattgttgctatagacatccataagatctgggttggtgccacattctagcagaatgatgacacaaatctcttcttggcaatgtacagccttcatcaaaggcatcctgtttcatttgtcaccaatgtcagtctggcactttcagttcacctggagagtgaccacttccacatggccattggcacaggccaaatgtaaagcagtcgtgttcatccacagatgaaggaatacagaaactccaggatatttgcacaatggaatactcttcagccatcaaactttaggacatcaccccacttccagcaacgtggagagaaacctgttcatccgcagatgaagggataaagaaactgtagtatatatacacaaatggaatactcttcatccagaaaaatgtaatgaaattacatcatttgcagccacactgttgaacctagaggacatcatggtaaatgacctgtcctgtccacccacagctgaagggataaagaaaccaccatacagatacactatggaatatgcttcagccataaagctttgggaaatcctgtcatccacagccatgtggagaaacccaagaaacccagaggatattaggtccaaggaaatgagcctggtagaggaagtcccacaccttttaatctcaggcatggagattccaaaaactttatctcctgtccatctacagatgaagggatcaagaaactgtaatgtatatgcacaaagaatactctttggccatcaaaataactaaaccatgtcatttggagcaacaaagccactgcggcctccatttgggccaagctctgactgcaatgatgcctctgccccgacccgggcctcgctgtgactgacaatgccgctgcatcttttcagcagtcattgatgaggaagtatctacatcctccttcccactaccagattttgcttggagaaaagcagtttcctgaaataattctgtgacgagcttcttccacattaggacaaaaatgctggtaacttttaaaaattcctacagaaacctcctgcttccctctccagccatatcccaggcaagcccccagcacaccaccctgccccagaacccatttcccatacccatccaccactcctgacctccaggccttggctcaggctggccttctgctcaaaggctctcctttggagtcgcctggctaagcacagctgtgcctcacccccgcaaaatctagtagtcatcttgaatttcttcctttccctcactatcattcattcattcaacaaaaatcttgtcatgtgcccgctgtgttccagcttttgttctaaatcctgggagacagtgtaattaagacacacaagtcctactcttgtacaacttgcatttgagcttggggcagcagggaaaggaggacaataaacaaaaccagataaatgctatgaaagaaaaaagataaaaccagtagactgtgatagtgaattaggggtgaggggagcagagtactattttaaatcagctgagcagggagaactcactaaggaggagacatttaacaagaaggaaccaccctggcaaaaacggggactaagccaagggcacatacggtgacatttttgccgtttgtagtaggaggggtcaaccaagtgatatgaggggaagggagcattcctctcagagggaaccacaagtgcagaggccctaaggtaagaagcagcttgatatttgaggaatggcagtgccttccttgggccatgcctgtgtgtgatgtaacggtcacaaacacttcttcacccaggttttacagcagaagggaactggtactccgacaagttccaaatgaggcagaagaatgtccgtatctctcctcttgtttgttcccttcgtcagtttgtttacccccccacccccacacccatctacctctagctccctaacctttctcctgccaccccccataaaggcccctaattaaataaaatatattttggaggagacc

SEQ ID NO: 18733 - protein, 102 aa, Homo sapiens [sequence omitted]

SEQ ID NO: 18734 - DNA, 3448 bp, Homo sapiens
  CDS (104)..(1057)
gtgcgcgctccctcggtgcggcgggctgcgtgcgcgagtgggaggtggcaggcctgcgactccggccttgtccgcgcccgctctcggcgcgacgtctccagccatgaaccggtttggtacccggttggtgggagccacggcgacttcttcgccgccgccgaaggcccgcagcaatgaaaacctcgacaaaatagatatgtctttggatgatatcatcaagttgaatcgaaaggaagggaagaagcagaattttccaagactaaatagaagactcctccagcaaagtggtgcccagcaattcaggatgagagtgcgatggggaatccaacagaattctggttttggtaagactagtctgaatcatagaggaagagtaatgcctggaaagagacgtcctaatggagttatcactggccttgcagctaggaaaacgactggaattcgaaaaggaattagtcctatgaatcgtccacctctaagtgacaagaatatagaacaatattttccagtgttaaaaaggaaggcaaaccttctgagacaaaatgaagggcagaggaaaccagtagcagttctcaagagacctagccagctaagcagaaaaaataacattccagctaattttaccaggagtggaaataaattaaatcatcagaaagatactcgtcaggcaacttttcttttcagaagaggcctgaaggtgcaggcccagttgaatacagaacaactgctagacgatgtagtagcaaagagaactcgtcaatggcggacttccaccacaaatggagggattttgactgtatctattgacaatcctggagcagtgcaatgcccagtaactcagaaaccacgattaactcgtactgctgtaccttcatttttaacaaagcgggggcaaagtgacgtcaagaaagttcctaaaggtgttcccctgcagtttgacataaacagtgtcggaaaacagacagggatgacgttgaatgagcggtttgggatcctgaaggaacaaagagccactctcacatacaacaaagggggaagccgctttgtcaccgtgggataggtcccatgtcaaaggaacttttgagtgatgactctgagaagttgaattgcttgaagagttcatcacggaaattcaagaaactttacttcaaaatattcacaaggctaaataactcttatttttatttttgaaggtttttttttttaaaaaaaaaaacgtataaaataatgccctgaaagaataatagggattatacctgtctgttcttaaagatttcatggttggctcagacagaacaatcatctgtttgacttctttggttcctcatgcagcagaaggaagacagaaagatagaaattgattatttttatgatagcggtattcaggatctcatcacctttgcccgtgttttagactttgtcatggtaaatcctggtcttcataaacatgagtaggtcccttggttgctgtcacttgccctttaatagtgttgatgtagtcagtgccgttgccttttcttcattagagacacagaacaatgtattagaatttccagctgtgggtttgaagacttagggggacatccagaacgtgcttcctctttcagacggtgtaaagtcccctggaattacacagctttagtgctgagcttttaacaggaaatgtggccctaggtattagtcttagtttaaaatgttggtgtttagagactgtaaatgcatattcacaaagttatctgatagggccttggaggagaaggtccagttttaaaaaatgacagtttgtgtttaataaatgaaggcatgagaggaagtaagtagcaagttgaaggacaggtagttgagatgaaacacttcaaaaccctggttatagatgtactgtttggatgtagcatagtcttgagtctagcgtccacaaagaattattcaaatgatatttagaagaattataactattacattgaatggagtcccttggatattttgatagtaaaattaatagccataaagtcctagacttcttatttgaagttaaaatttcttatttgaaaagttgaaatttatgagctttgaagattgctaaattaaataatttatagctccaaaaacaaaaatatacttgtatatgtcacagagaaaaaaaatgcaaaatttataatagagttacattaaccttgttgtttacctttcactgatttcttatatggtataaattaaagttcaggcatttatggggagaaaaggccctccccaccgacccgccacctgccacctctgacggagtgggagaagttagtctgtgctaagatagtactgagtccccagatgttgtgtactgtaaattacagtataatgccaaatgcagcaaaatcttccagctgtacgttacaagtttggtcattttgaagcttgacattttagtttgccattatgttaaaaacatctaaataggtgttagtttctcaggagtagattgttagtgttgacttttcctgtaaagcagacatcgttcttggcctgccctgcattgtatactagatttcattgttgtctctcatgcttcttgagttgcttcatggtttatgctcgccatggaaagctatcagtaacagtttcatgcttataccaaagaattaaatctgatctttaatatctgatattttcctggtactcgtactgataagggattattggaagtcagtcacagaatttggaaataaattctagtctctccttagctatttgatgcttttcatataggccaagaactcattgcaaaacatttttgcaaggatgaatgcctgtatttggtctaggaacagtacattttagtctgatttagaattactggtagcttattttaaagcaaggaaaagcagctgagctcaagtttgctgtctttagaatggtttgtgaaaatatggtataaaggtgttttcattttcctgttcttacctattattgtatagagctattcatgccattttttgggaaaactttaaaaattgccccaaatactgacattgagtgcattaaataacaaattatctttgatacattaaacttttattcttcatgcatctgtaatttaattttaagtataatgttttgcctttggtacaactaaattaaaactcttggtggtcacatattgtatataaacaaaacaatatgctttgttgaaggaaaattttctttattggaatgtggttgtaatccttgttcagttcttaagtttcggttttttttaaaaacaggatgcaacttaaacttttctttgcatcaaggtatatgcaaaacattggtgccgtgcatcaccaaatgaaagtttgtatttaacgaggaggtgctttacactgtactttttggtgttttttggaaaagttacatttagatctattctgaagctgttcatttttaacaaataaaatgttacaggtttcacatg

SEQ ID NO: 18735 - protein, 318 aa, Homo sapiens [sequence omitted]

SEQ ID NO: 18736 - DNA, 2796 bp, Homo sapiens
  CDS (96)..(2168)
aattaaatgcatatgttctccaagaaccacctaaaggagaaacctacacctacgactggcagctgattactcatcctagagactacagtggagaaatggaagggaaacattcccagatcctcaaactatcgaagctcactccaggcctgtatgaattcaaagtgattgtagagggtcaaaatgcccatggggaaggctatgtgaacgtgacagtcaagccagagccccgtaagaatcggccccccattgctattgtgtcacctcagttccaggagatctctttgccaaccacttctacagtcattgatggcagtcaaagcactgatgatgataaaatcgttcagtaccattgggaagaacttaaggggcctctaagagaagagaagatttctgaagatacagccatattaaaactaagtaaactcgtccctgggaactacactttcagcttgactgtagtagactctgatggagctaccaactctactactgcaaacctgacagtgaacaaagctgtggattacccccctgtggccaacgcaggccccaaccaagtgatcaccctgccccaaaactccatcaccctctttgggaaccagagcactgatgatcatggcatcaccagctatgagtggtcactcagcccaagcagcaaagggaaagtggtggagatgcagggtgttagaacaccaaccttacagctctctgcgatgcaagaaggagactacacttaccagctcacagtgactgacacaataggacagcaggccactgctcaagtgactgttattgtgcaacctgaaaacaataagcctcctcaggcagatgcaggcccagataaagagctgacccttcctgtggatagcacaaccctggatggcagcaagagctcagatgatcagaaaattatctcatatctctgggaaaaaacacagggacctgatggggtgcagctcgagaatgctaacagcagtgttgctactgtgactgggctgcaagtggggacctatgtgttcaccttgactgtcaaagatgagaggaacctgcaaagccagagctctgtgaatgtcattgtcaaagaagaaataaacaaaccacctatagccaagataactgggaatgtggtgattaccctacccacgagcacagcagagctggatggctctaagtcctcagatgacaagggaatagtcagctacctctggactcgagatgaggggagcccagcagcaggggaggtgttaaatcactctgaccatcaccctatcctttttctttcaaacctggttgagggaacctacacttttcacctgaaagtgaccgatgcaaagggtgagagtgacacagaccggaccactgtggaggtgaaacctgatcccaggaaaaacaacctggtggagatcatcttggatatcaacgtcagtcagctaactgagaggctgaaggggatgttcatccgccagattggggtcctcctgggggtgctggattccgacatcattgtgcaaaagattcagccgtacacggagcagagcaccaaaatggtattttttgttcaaaacgagcctccccaccagatcttcaaaggccatgaggtggcagcgatgctcaagagtgagctgcggaagcaaaaggcagactttttgatattcagagccttggaagtcaacactgtcacatgtcagctgaactgttccgaccatggccactgtgactcgttcaccaaacgctgtatctgtgaccctttttggatggagaatttcatcaaggtgcagctgagggatggagacagcaactgtgagtggagcgtgttatatgttatcattgctacctttgtcattgttgttgccttgggaatcctgtcttggactgtgatctgttgttgtaagaggcaaaaaggaaaacccaagaggaaaagcaagtacaagatcctggatgccacggatcaggaaagcctggagctgaagccaacctcccgagcaggcatcaaacagaaaggccttttgctaagtagcagcctgatgcactccgagtcagagctggacagcgatgatgccatctttacatggccagaccgagagaagggcaaactcctgcatggtcagaatggctctgtacccaacgggcagacccctctgaaggccaggagcccgcgggaggagatcctgtagccacctggtctgtctcctcagggcagggcccagcacactgcccggccagtcctcctacctcccgagtctgcgggcagctgctgtcccagcatctgctggtcatttcgccctgacagtcccaaccagaacccctgggacttgaatccagagacgtcctccaggaacccctcaacgaagctgtgaatgaagaggtttcctctttaaacctgtctggtgggcccccagatatcctcacctcagggcctcctttttttgcaaactcctcccctcccccgagggcagacccagccagctgctaagctctgcagctccccagtggacagtgtcattgtgcccagagtgctgcaaggtgaggcctgctgtgctgcccgcacacctgagtgcaaaaccaagcactgtgggcatggtgtttccctctctggggtagagtacgccctctcgctgggcaaagaggaagtggcacccctcccctcaccacagatgctgagatggtagcatagaaatgatggccgggcgcggtggctcacgcctgtaatcccagcactttgggaggccgaggcgggcggatcatgaggtcaggagatcaagaccaccctggctaacacggtgaaaccccatctctact

SEQ ID NO: 18737 - protein, 691 aa, Homo sapiens
MEGKHSQILKLSKLTPGLYEFKVIVEGQNAHGEGYVNVTVKPEPRKNRPPIAIVSPQFQEISLPTTSTVIDGSQSTDDDKIVQYHWEELKGPLREEKISEDTAILKLSKLVPGNYTFSLTVVDSDGATNSTTANLTVNKAVDYPPVANAGPNQVITLPQNSITLFGNQSTDDHGITSYEWSLSPSSKGKVVEMQGVRTPTLQLSAMQEGDYTYQLTVTDTIGQQATAQVTVIVQPENNKPPQADAGPDKELTLPVDSTTLDGSKSSDDQKIISYLWEKTQGPDGVQLENANSSVATVTGLQVGTYVFTLTVKDERNLQSQSSVNVIVKEEINKPPIAKITGNVVITLPTSTAELDGSKSSDDKGIVSYLWTRDEGSPAAGEVLNHSDHHPILFLSNLVEGTYTFHLKVTDAKGESDTDRTTVEVKPDPRKNNLVEIILDINVSQLTERLKGMFIRQIGVLLGVLDSDIIVQKIQPYTEQSTKMVFFVQNEPPHQIFKGHEVAAMLKSELRKQKADFLIFRALEVNTVTCQLNCSDHGHCDSFTKRCICDPFWMENFIKVQLRDGDSNCEWSVLYVIIATFVIVVALGILSWTVICCCKRQKGKPKRKSKYKILDATDQESLELKPTSRAGIKQKGLLLSSSLMHSESELDSDDAIFTWPDREKGKLLHGQNGSVPNGQTPLKARSPREEIL

SEQ ID NO: 18738 - DNA, 3299 bp, Homo sapiens
  CDS (19)..(1977)
aatcccaaaggggcccagatgcagccgatctccctccccagagttcagcaggtaccccagcaggtgcagccggtgcagcacgtgtatcctgcccaggtgcagtacgtggaagggggagacgccgtctacaccaatggaaccatacgaacagcctacacctacaaccccgagcctcagatgtacgcccccagcagcacggcttcttacttcgaggccccaggcggtgcccaggtgaccgtggcagcctcgtccccgccagcggtcccctcccacagcatggtgggcatcaccatggatgtcggggggagccccatcgtctccagcgcgggagcctatctcatccacggggggatggacagcaccagacactccctggcccacacctcccgctcatcgcccgccacgctccagtggctgttggataattatgaaacagcggaaggtgtgagtctccccagaagttctctttacaaccactaccttcggcactgccaggagcacaagctagacccagtgaacgccgcctccttcgggaaactgatccgttctgtgtttatggggctgagaacgcggcggctgggcaccaggggcaactcgaagtaccattactatgggattcgtctgaagccggactcaccactgaaccggctgcaggaggacacgcagtacatggccatgcggcagcagcccatgcaccagaagcccaggtaccggccagcccagaagacggacagcctcggggacagcggctcccacagcggcctgcacagcactccggaacagaccatggccgtgcagagccagcaccaccagcagtacatagatgtctcccacgtcttccccgagttcccagcgcccgacctgggcagcttcctgctgcaggacggcgtcacactgcacgacgtcaaggccctgcagctggtgtacagacggcactgcgaggcaactgtagatgtggtgatgaacctccagttccactacatcgagaagctgtggctctccttctggaactctaaggcctcctccagcgacggccccacctctcttcctgccagtgacgaagaccccgagggcgccgtcctgcccaaggacaagcttatctccctgtgtcagtgcgaccccatcctcaggtggatgaggagctgcgaccacatcctctaccaggcgctggtggagattctcatccccgacgtgctgaggccggtccccagtaccttgacacaggccatccgtaactttgccaagagcttggaaggctggttgacaaatgccatgagtgacttcccacaacaggtcatccagaccaaggtgggcgtcgtcagtgccttcgcccagacgctgcggcgctacacgtccctcaaccacctggcgcaggcggcccgggcggtgctgcagaacacgtcccagatcaaccagatgctcagcgacctcaaccgcgtggactttgccaacgtgcaggagcaggcctcgtgggtgtgccagtgcgaggagagtgtggtgcagcggctggagcaggatttcaagctgaccctgcagcagcagagctccctggaccagtgggccagctggctggacagtgtggtcacccaggtcctgaagcagcatgccggcagccccagcttccccaaggccgcccggcagttcttgctgaaatggtccttttacagctccatggtgatccgggacctgaccctgcgcagcgctgccagcttcggctccttccacctcatccgcctgctctacgacgagtacatgttctacctggtggagcaccgcgtcgcggaggccaccggagagacgccgatcgctgtgatgggagagttcaacgatctcgcctctctgtcgctgacgctgctcgacaaagatgacatgggcgatgagcagcgtggcagcgaggcgggcccagacgcccgcagcctgggtgagcccctggtaaagcgggagcgcagtgaccccaaccactccctgcagggcatctagcagccccggccggcgcctcctcgaggttccaaaagatgccgcctggtcactctgggaacctggatttcaccggctccaccaaattagtgcctcttagatgatgtgatgtttactttgactcaagcgggggctcccggggtcagtgttcaagaaggaaagcagttgttgaagctacagaagcccaggccagggctcccactggctgtagctgtgctctgggtccccaggtccctgcgcagccaccagggccccaccagaccatgggttccttattctggacaaaccctcctctgctggaaccctggactttggccccagtccctttaagagctgaaagggctgtgctgagagcactggcctctgcactcaactggaaccaattttcaccatgattttaaaaattaaaaaaacctggcagagcccgactagaaagggacggcctctcccctcctacctgccaccgctggggaggcacagagctcgccagcgtccctggagtcccctcaggaatggaaagtggagtgcccttgtctggtagcaccatgtgggagggacccagctgggcgcagcgccctgtggccttttagatccagacctccctgccggatgccccgaggcgggaggccggctgtgctgcaggaacccatctccagatgccaaaggacttgaggggcagctgacaatcgctgtgtcccggcagatccgcagctcggaaaagaacaagccacagaaacgggctcgctcgtgccaggacacagcagtgtctttcaaaaaatcaaaaccagaagttttatcagcagcaggaaggatgtgggactctgtccaagttcaccgtcaccatcaagccactggctgtggaaggagtttgtccaacagggtcagtgtcacagccacaacttcagaaagcagccatcccgcgtgtcgtccaaacagcagtgcctgcgtcccgctccacggagtcttccagaacacctccctctgaactaatcccggagcaccccacccccagcgagtcccacctggacctcttcaaagtcaaaactcttctctcgggacaaacaaatattcgggactttcgaagccctgaacttgagacaccaagtttgtctccatggaaacacgtagccgctgcagttggacagctgcgtgctggagttctgtccccaaaccaactgcagagaagaaagacgagcctcggcccaggacgcgatttctaacgaaatgcaatagttttctctttttggaaaaatgtttataccaatagttttgtgcgctaattgttattagaacgtttcttatgaatgtgtacattgcagtat

SEQ ID NO: 18739 - protein, 653 aa, Homo sapiens [sequence omitted]

SEQ ID NO: 18740 - DNA, 2150 bp, Homo sapiens
  CDS (172)..(1014)
ggatttgggagttgagcaccttcgtcgccattggctttcctcccccagctccagcctctctcatcttgggaatctgcgtcagaagtcactcgcagtcccgtcagcccagaagaagacgtaaagcaggctaccagcaattttgagaacttgcaaaaacagcttgcaaggaaaatgaagcttcctattttcatagcagatgcattcacagcaagagcatttcgtgggaatcctgctgctgtttgcctcctagaaaatgaattggatgaagacatgcatcagaaaattgcaagggagatgaacctctctgaaactgcttttatccgaaaactgcacccgacagacaactttgcacaaagttcctgctttggactgagatggtttacaccagcgagtgaggtcccactctgtggccatgccaccctggcttctgcagctgtgctgtttcacaaaataaaaaacatgaatagcacgctcacgtttgtcactctgagtggagaactaagggccagacgagcagaggacggcatcgtcctggacttgcctctttatccagcccacccccaggacttccatgaagtagaggacttgataaagactgccataggcaacacactggtccaggacatctgttattctccagatacccaaaagctcctcgtccgcctcagtgacgtttacaacaggtcgtttctggagaacctgaaagtgaacacggagaatctgctgcaagttgaaaacacagggaaggtgaaagggcttattcttacccttaaaggagagcctggtgggcagacccaagcatttgacttttactcaagatattttgcaccgtgggttggtgtggctgaagacccagtgacaggtctgcacatgctgttctcagcagctactggtcccagcatctggggaagaaagaaatgcatgcttttcagtgttcccaccgaggaggagagctgggaatttcccttcgtccagacggaagggttgacattagaggaggtgcagctgttgttttagagggcacactgacagcctagaggtggttatgctgtgacgctgctgtctctaaccaccaagtattttctgcttaaaaagaaatgtaaggggctgcctttagcaaatgtgcgtagtagtctacttaatcctcatgttaaaaatcgaaaaatgggccaggcgcagtggctcatgcctgtaatcgtagcactttgagaggccaaggtgggtggatcacctgaggtcaggggttcgacaccagcctggccaacatggtgaaacctcgtctctactacaaatacaaaaattagctgggtgtggtgccacatgcctgtaattccagctacttgggaggctgaggcatggagaatcgcttgagcccaggaggcggaagttgcagtgagcagagatcacaccactgcactccagcctgggcaacagagtaagactccatccacacacacacacacacacacaaaattgaaaagtgaagacattttaatggagatttaatagtgcttccagactaatgaactaatggagttttggctccactcatgagtgtatttgaaatgtaagtaaccagctacaaagaataatgtcacttcatttgattatgactaccaatcaagagaaggaggaatacatttctgaggagtgatactaaaccatttgagcttaaatgagtacctgattttgcagccattaaaatgagtcaataactatgtggaaatatagaaaaatattttataatataatactaagaaagaggacagtaggccataaagtgttagcagtgttatgctatgtctatataaataagcatgggccattaaaaatagcaaactgaaaacagttcatgtgtggggggcaagtttagaagtaattttaatgtatctaagaagtgatttcctttattgttgtactcaggtaggaagactaaaaatcaggatgaatccagaaaattaacacaaaaaagtatgtattaggctacttcctgtcatagtggaattaaacactcaaagtaatgtaatctcagctgggcgtggcggctcatgcctgtaatcccagcacttcggcaggacaaggcaggaggatcacttgaacctaggagttcgagaccagcctgggcaacacagcgagaacttgtctctatt

SEQ ID NO: 18741 - protein, 281 aa, Homo sapiens [sequence omitted]

SEQ ID NO: 18742 - DNA, 2591 bp, Homo sapiens
  CDS (884)..(1408)
acattgaccaggtggccagacacctgaggtgaggcccaggggcacctgcatgtgtataggcaggggtggagacaaggatggatcttgaggtgctgggattgtgagacaggaggtgggtagtatacttggcggggaggcccatgtgcgtaaggctgagaggtggaaagagctggctgctatagagctagtgaggttgctttcaggaagcagccaagtacagatgccacggccgagcatgatggtgcatgcctgtaatcccagcaatttgggaggccgaggcaagagggtcatttgggcccaggaattcgaaaccagcttggccaacatgggaaaaccccatctctaccaaaacaaatacaaaaattagctgggcgtggtggtgcacgcctgtaccagttacttgggaggctgaggtgagaagggattgattgagccctggaaggtaaggctacagtgagtcatgatgggtggcagagcaagaccctgtttctttctttctttctttctttctttttttttttttttgagatggagtcttgttctggcgcccaggctggagtgcagtggcgtgatcttggctcactgcaagctccacctcccgggttcacaccattctcctgcctaagcctcccgagtagctgggactacggatgcccaccaccatgcccagctaatttttttgtatttttagtagaggcggggtttcactgtgttggccaggatggtctcgatctcttgatctcatgatccgcccatctcagcctcccaaagtgctgggattacaggcatgagccacctcgcctggccgaccctgtttcaaaaataaataccttgacacaggggtagcctgtgtcagaggattttaagcagcggaagggctgtgatgtgggggaagatggaggcaagaagaatcacagtgcagaagtgtgggagagagaaggatgcctgccagggtgaggcaggcgaggggaagatacttcctgcccagaaagagcctcacaggggccagacgtctatgctgggtcagcccccaagcagcagagggcagtgtgggctgaggaaggacaggttgggtggggctcctgctgaggctggaggttggggccatgtggtggactcagctgagccctggtcctgtgtctcgggttctggctgctgctccctcatgtcccaggggccttctggaggaggagtgtcacaccttggagagggagatcctcatcctgcaggtgagccgcagccctgggccctcccccgagcctcactgctgagcgtagactctcacctgggtgagacccatgtacctgtgtgcatacataggtgcatgtacaggctatgtgagtcctgcatccatttctcaggggtgcatgcttgtgtgcacctgcaaaatcctggaggcccaggattctagttgagcccttaaggccagggccaaccgttttaggtcttttgcctccttcctttacctaagtctgggtacaggccccaccactatcttgccaaactcagctcttccgcaaggctggtattccctggggaacgtggctgccctcacggtggatgggctgaaggggctgcacgggcctgccctggggatcttggcctctgtatcctgccttgccccacccctgccttgagtctgggcactgacgcagctctccctgcagcgctgcctggaagaggagtatttgaggccttgccacccctctgaggcagccctggagcccaccctggcaggtgaggacacggagcagggcccagaacacccagcctcctgctcccaccccacacttgtacacaccctagaagagctgggcactgtctcagcccaatctctccttcagagctaaaggaacagaagaaggccatggagcaggagctgcaggcatctgtggggccttcttgtgtctctcccaaccacaggtaaaccacaacagtagacacagggcagggtggactgaaggatcagaccaccacccctcacagttactctttcttgtccaggcagcggcccttggggtcctccacacagggcctcagacccccgcttcccctctgcggggttgcacctctccagtgctgcctgcctgcacctcctctggagccctaccttcgacctcgaggccagtcggctacccaccgctggggacggcagcttcagtgcagccccagggaagggccagcttccacacccatgtccagtgcagcaccccaagccccagcctgaagggctggtcaccgagtaggctctggcttctgccacagcgcacctgtctgccgctgccgcctcagctgctttggcccagccagcttcagatctggtcttggcgagctctcgccaggaccccaaggctgttggtctgtctggcccttgccccacccccttgccagatccctggtgtctggagctgagtggccgggcatcggtcccaagcatcaaagcctttggcctttctcctcccaggcctccacaaaggcctggcagacagaggtctcattccagcctgactcttgtcccctgggggacccagacaaagcacagcagccgctcagagacaggaatagaaatttcattaaaatctatggacttt

SEQ ID NO: 18743 - protein, 175 aa, Homo sapiens [sequence omitted]

SEQ ID NO: 18744 - DNA, 2651 bp, Homo sapiens
  CDS (91)..(1578)
gtgtggaagtgacgctgcccccgctgcccaaaatgtcggcgcccagagggaggtagagagcccccacataccactgtattccccgccaccatggatgacgtccccgccccaacccctgcaccagcaccgcccgccgctgccgcccccagggtcccgtttcactgcagtgaatgtggcaagagcttccgctaccgctcagacctgcggcgccactttgcccggcacacagcgctcaagccccacgcatgtccgcgctgcggcaagggtttcaagcacagcttcaacctagccaaccacctgcgctcgcacaccggggagcggccctaccgctgctctgcctgccccaaggggttccgcgactccaccggcctgctgcaccaccaggtcgtccacactggtgagaaaccctactgctgcctggtctgcgagctccgcttctcctcacgctccagcctgggccgccacctcaggcgccagcaccgtggggttctcccctctcccctgcagcccggccctggcctgcccgccttgagtgcgccctgctccgtctgctgcaatgtggggccctgctcggtgtgcgggggctcaggggccggcggcggagagggccccgagggggcaggcgcgggtctgggcagctgggggctggcagaggcggcagctgcggccgcggcctccttgcccccatttgcgtgcggcgcctgcgcgcggcgcttcgaccacggccgcgagctggcggcccactgggcggcgcacaccgacgtgaagcccttcaagtgcccgcgctgcgagcgcgacttcaacgcgcccgcgctgctggagcggcacaagctgacccacgacctgcagggcccgggcgcgcccccagcgcaagcctgggccgcggggccaggcgcagggcccgagacggcgggcgaaggcaccgctgcggaggcgggcgacgctcctctggcttcggaccgcaggctgctcctgggccccgcggggggcggcgtgcccaagctcggggggctgctccccgagggcggtggggaggcgcctgcacctgcggcggccgccgagccctcggaagacaccctgtaccagtgcgactgcgggaccttctttgcgtcggccgcggccctggccagtcacctggaggcccactcgggcccggccacctacggctgcggccactgcggggctctgtacgcggcgctggccgccttggaggagcaccggcgggtcagccacggtgagggcggcggggaggaggcggcggccgccgcccgggaaagggaaccggcgtccggggaacccccgtctggctccggccgcggcaagaagatcttcggctgctccgagtgcgagaagctgttccgctcaccgcgagacctggagcggcacgtgctggtgcacactggcgagaagccgttcccgtgcctggagtgcggcaagttcttccgccacgagtgctacctcaagcgccaccggctgctgcacggcaccgagcggcccttcccttgccacatctgcggcaagggcttcatcacgctcagcaacctctccaggcacctgaagctgcaccggggcatggactgactgccaggctgcgtgcgccctgccctccacccagcctcctggactcggcctggaccaggggacctcgggactgcgcgtgaggccccggccctccaaatccaaatccagacgcaggccctgaaatgaggggaccctgactggagaggtgggggccaccaaaaacccacaaaggccccggagctgggggaccacaaacaaacagggtccttagctggggcaggggagcccaaatctagggagagactcctgagcctgaggtccctggaatgagtgtgggtagccgtaagtccccaagacatggggactttgcagtgagcaatgggtctccacaagtacctctcatcttgagagccctaatactaaaagatgggcacccacccccaccaagggaagactgccccattccctgagagccatcattcctaacgaccttgatctggagaatgtggagggagcatgtccctgaattttcctagatccctccaaatgccacccaccagagtcactggtgaccccagaaaatggatatagccgaaatctgcctttcccctttttcattccctgtgctgaaagagggaccagggtagatgccccctgccctcgaatcccccctccccgactgtggaatggatcgaccctaacgatcttccccgccccaaacactagaatagactggcctgaaatccccttgcccagtagaatggactgatctatgtgcacacacccccatcacatggaatgggctggtctaggctgtggcctgccaccttccttagagtgaatagggcggacactcctctcttttcctgtagcgtgtggaccggtccacgcaattctttatcctgtgaactcatctgagtgggaggtggtggacactggggtttccttccctctctccgtagcatccgttggtctttctctccatctctgttggtttgtctgtctctgtcttcctcccaatccctaggggaagggggcatttggctagggggtgcccctgtgagcctcgaccttgccccctcgtccctctccccagtgtttccaggacccccaataaaccttgtcctgtc

SEQ ID NO: 18745 - protein, 496 aa, Homo sapiens
MDDVPAPTPAPAPPAAAAPRVPFHCSECGKSFRYRSDLRRHFARHTALKPHACPRCGKGFKHSFNLANHLRSHTGERPYRCSACPKGFRDSTGLLHHQVVHTGEKPYCCLVCELRFSSRSSLGRHLRRQHRGVLPSPLQPGPGLPALSAPCSVCCNVGPCSVCGGSGAGGGEGPEGAGAGLGSWGLAEAAAAAAASLPPFACGACARRFDHGRELAAHWAAHTDVKPFKCPRCERDFNAPALLERHKLTHDLQGPGAPPAQAWAAGPGAGPETAGEGTAAEAGDAPLASDRRLLLGPAGGGVPKLGGLLPEGGGEAPAPAAAAEPSEDTLYQCDCGTFFASAAALASHLEAHSGPATYGCGHCGALYAALAALEEHRRVSHGEGGGEEAAAAAREREPASGEPPSGSGRGKKIFGCSECEKLFRSPRDLERHVLVHTGEKPFPCLECGKFFRHECYLKRHRLLHGTERPFPCHICGKGFITLSNLSRHLKLHRGMD

SEQ ID NO: 18746 - DNA, 2802 bp, Homo sapiens
  CDS (99)..(1868)
ctataaaatctcagtaccagtttccaccccctctcattgcacccgcggccattcgggacggggagctgatctgcaatgggatccctgaggaatcacagatgcaccttttgaactctgagcacttagccacccaagcagagcagcaagagtggctctgtagtgttgttgcgctccagtgcagcatattgaaacatttatctgctaagcagatgccttcgcattgggactctgaacagacagagaaggctgatattaagcctgttattgtgactgacagctcagtcaccacctccctgcaaacagctgacaagacacctacaccttcccactaccccttgtcctgcccctcagggattagcacccagaattccctgagctgctctccaccccaccagtccccagccctagaggacatcggctgcagttcttgtgcggaaaaatccaagaaaaccccttgtgggactgccaatgggccagtgaacacagaggtgaaagctaatggcccacacctctacagcagccctactgattccacggacccccggcgacttccaggcgctaacaccccactaccaggcctctcacaccggcaaggctggccccggcccctcacgccaccagcggctgggggccttcagaaccacaccgtcggcatcattgtgaagacagagaatgccactggccccagctcttgcccccagaggagtttggttcctgtcccaagcctgcccccttccattcccagctcttgtgccagcatcgagaacaccagcactttgcaaagaaagactgtccaatcacagataggacctccgttgacagattcaaggccactgggctcacccccaaacgccacccgggtgctcactcccccgcaagcagcaggagatggtatcttggccacaacagccaaccaacgattcagctcaccagcgccatcgtcagatggcaaggtcagccccggcacgttatccataggaagcgctttaaccgtaccctctttcccagccaactctactgccatggtggacctcaccaactcacttcgagcatttatggatgtcaatggagaaatcgagataaatatgctggacgagaagctgatcaagtttctggccttgcagagaatacatcagctttacccctcccgggtccaaccttcaccgggcagtgtcgggacacatcagctggcttctggagggcaccacatagaagtgcaaagaaaggaggtacaggcccgagctgtgttctaccccctcttagggttgggaggagctgtgaacatgtgctatcgaaccctctacatcgggacaggagctgacatggatgtgtgccttacaaactatggtcactgtaactacgtgtccgggaaacatgcctgcatattctacgatgagaataccaaacattatgagctgttaaactacagtgagcatgggacaacggtggacaatgtgctgtattcatgtgacttctcggagaagaccccgccaacccccccaagcagtattgttgccaaagtgcagagtgtcatcaggcgccgccggcaccagaaacaggacgaagagccaagtgaggaggcagccatgatgagttcccaggcccaggggccgcagcggagaccctgcaattgcaaagccagcagctcgagcttgattgggggcagtggggccggctgggagggcacagccttactgcaccatggcagctacatcaagctgggctgcctgcagtttgtcttcagcatcactgagtttgcgaccaaacagcccaaaggcgatgccagcctgctgcaggatggggtcttggccgagaagctctctctcaagccccaccagggccctgtgctgcgctccaactctgttccttaggactggcggctaccccgccactggcctgtacacccacccaagactcctgcaatgcaaaaatgtacacaaaccaagcccgggtgttttctatactctaccagaaacccttcaactacaatctttgcatgaaatgaagaaaaccttttgactgttttttaaaaatcctttttcttttctcaagttctagggggcatttgcacatatatttgtactcaacatttcatgggaaagcggcagacctgagctgaggaacagcgtgggcagggagggaaagacccagggtctggacacttcctccaacacaaaacccttccccacccacctcctgctccctccccctcgcccaccattgtaaaataatcagaaacttgttctattttgtggcagtgacaatagttttatattaaaagaaaaaatacagttttcatacagcaaaatctatacaatatcattgttttatttaatataaagatcgctacccaccttccttccatggttcccaccctccacgttattttccctttctgcagcggttgcactacaggtagctactgtgtattatggacaaatgagaaatgaattctttttctggctgtccatctattttatttcaaataaggaaaagtgtatttggattttgtgtaaatacatctagtgatgacattttttcaatgtttttaaaaaccgtgtacagtactacatgtggtagagcgttttctcaaattgtctattgtagcaaaaatgtttttgtcgtaaacctgttttgtctcctttttttgttctcttgccacttctctcctcttcctcctgcccctggttccctcctctcctcccacccccccaaccagtaccaatgtacatagtaattgtaatgttttagactttacagaaactttcctgtattctgtatataaaaaaacaaaaatacttc

SEQ ID NO: 18747 - protein, 590 aa, Homo sapiens [sequence omitted]

SEQ ID NO: 18748 - DNA, 2570 bp, Homo sapiens
  CDS (52)..(702)
actattggccagttccgttcaacgaagtggttgctttttttagttccggcaatgagttgcgccggggcggcggcggctccccgcctttggcggctgcgcccgggggcccggcggtccctctcagcttatggaagaagaaccagtgtcagatttcgcagttcaggaatgactttagacaatatcagtcgggcagctgtggatcgaataatccgggtggatcatgcaggcgaatatggagcaaaccgcatctatgccgggcagatggctgtcctgggtcggaccagcgtcgggccagtcattcagaaaatgtgggatcaagaaaaggaccatttgaaaaagttcaatgagttgatggttatgttcagggtccggccaacagttctgatgcccttgtggaacgtgctggggtttgcactgggggcggggaccgccttgctcgggaaggaaggtgccatggcctgcaccgtggcggtggaagagagcatagcacatcactacaacaaccagatcaggacgctgatggaggaggaccctgaaaaatacgaggaacttcttcagctgataaagaaatttcgggatgaagagcttgagcaccatgacataggcctcgaccatgatgcagaattggctccagcctatgccgtcctgaagagcattatccaggccggatgcagagtggcgatatatttatcagaaagattataaagtgtgtccagttttgcctgtctataaaagatgatagtaatttaccaagtgacatttgcagagaaacaggtgtacagttatcgttgtacttttgtacaatgtgaattttgttaataaattataaggtttgtttttttttttttaaactctgcagtgttgatttttctctgggttgttttttctgccatgagaccaacaggtcaccagccttgttcaagttacagcaaacgaagctgggccttgtttggtctcatacttaattttcttttatatacatgtttttcttttacatgcatatatatatattttattttattttatgttttttggagacagggcctcgctcttttgtccaggccgggtcacaactcactgcagcctggacctcctagcctcaagcaatccacccacctcagccttccaagtagctgggactacaggtgtgcaccaccacagctggctaattctatttttttatagaggcgaagtctcactatgtcgccaggctggtctctaactcctgggctcagtgatcctcccgtttcgacttcccaaagtgctgggattacaggtgtgagccacttcaccaggcccattttctcctaaaacttcaaggacaaatcattaataatgtaacaggaatctttaggagaaaaaacaatttggtttactgataacaaaagataattggaaacatgagagtatttgagattggccaagcagaactatgaagtccatcaagtaagtcaaagatcatcgtttctgttttgaattgtgggtgataatgggtgggagagtgctacagtctgtatgtctgtgtctccctagaattcatacgatgaaatcttcactctcaagttgatagaaggtggggcccttgggaagtgtgaggtcatgagagtggagccctcatgaatgggatcagtgccttatgaaaggccctagagagatacctcatcctctccacagtgtgagacttcaaggggaagtatgagacttctctgaggaagcagacccttcacaagcaaaatcagccagcactttgatcacggacttcccagcctctaggactgtgagcaataaatgtttgatgtttataagccacccagactgtggtattttgttatagcagcctgaacagactaagacgggggtgttgcttccatcaaaggatgtactaagttgtggattatttgtgaaattgaattacaaccttttccttaaggtcttttaccacctcccccccaaaaaaatcccccaaaactgattcagattttcatactttaatgaaatattttataatttgcaaatttttaagtaatttatgaaaaacctagatcagtggatctcctctctggctgcccattagaatgtcctgtggagattaaacttttttttttcagtttatggaccaagagttttgatttatttagggtggagttcaggatcagaatggtttcagaagctcccaggtgattccggagtgagttggagctgcaagcccctgagctagattataagatgcttctgggaaagaaccacattttaggaatttgcttcccacccagtgccctgcatttaatcagcacctgatgacttggcaggacttgccccaccagggtctggctttgaagggtagtggacaccaggatcctttggattaatcctctgccacctctctcttttcctcaaccgagagtgaatttatgtaattgagtgaaagtctacgaatcataattgtaataaattaaggctgggcatttgtttgaaattagataggataaagccaaaggtttgaacaagttgtggatggtttgtaaaaattaatcttacaaaataaatgctgtgtgtgaacacgttgattg

SEQ ID NO: 18749 - protein, 217 aa, Homo sapiens
MSCAGAAAAPRLWRLRPGARRSLSAYGRRTSVRFRSSGMTLDNISRAAVDRIIRVDHAGEYGANRIYAGQMAVLGRTSVGPVIQKMWDQEKDHLKKFNELMVMFRVRPTVLMPLWNVLGFALGAGTALLGKEGAMACTVAVEESIAHHYNNQIRTLMEEDPEKYEELLQLIKKFRDEELEHHDIGLDHDAELAPAYAVLKSIIQAGCRVAIYLSERL

SEQ ID NO: 18750 - DNA, 2192 bp, Homo sapiens
  CDS (46)..(2103)
gcggagagaggcgagcaccgggaaggggagtgtggggccgctggaatgggtgaatttaaggtccatcgagtacgtttctttaattatgttccatcaggaatccgctgtgtggcttacaataaccagtcaaacagattggctgtttcacgaacagatggcactgtggaaatttataacttgtcagcaaactactttcaggagaaatttttcccaggtcatgagtctcgggctacagaagctttgtgctgggcagaaggacagcgactctttagtgctgggctcaatggcgagattatggagtatgatttacaggcgttaaacatcaagtatgctatggatgcctttggaggacctatttggagcatggctgccagccccagtggctctcaacttttggttggttgtgaagatggatctgtgaaactatttcaaattaccccagacaaaatccagtttgaaagaaattttgatcggcagaaaagtcgcatcctgagtctcagctggcatccctctggtacccacattgcagctggttccatagactacattagtgtgtttgatgtcaaatcaggcagcgctgttcataagatgattgtggacaggcagtatatgggcgtgtctaagcggaagtgcatcgtgtggggtgtcgccttcttgtccgatggcactatcataagtgtggactctgctgggaaggtgcagttctgggactcagccactgggacgcttgtgaagagccatctcatcgctaatgctgacgtgcagtccattgctgtagctgaccaagaagacagtttcgtggtgggcacagccgagggaacagtcttccattttcagctggtccctgtgacatctaacagcagtgagaagcagtgggtgcggacaaaaccgttccagcatcacactcatgacgtgcgcactgtggcccacagcccaacagcgctgatatctggaggcactgacacccacttagtctttcgtcctctcatggagaaggtggaagtaaagaattacgatgccgctctccgaaaaatcacctttccccaccgatgtctcatctcctgttctaaaaagaggcagcttctcctcttccagtttgctcatcacttagaactttggcgactgggatccacagttgcaacaggcaagaatggggatactcttccactctctaaaaatgcagatcatttactgcacctaaagacaaagggtcctgagaacattatctgtagctgtatctccccatgtggaagttggatagcctattctacagtttctcggttttttctctatcggctgaattatgaacatgacaacataagcctcaaaagggtttccaaaatgccagcattccttcgctctgcccttcagattttgttttctgaagattcaacaaagctctttgtagcatcaaatcaaggagctctgcatattgttcagctgtcaggaggaagcttcaagcacctgcatgctttccagcctcagtcaggaacagtggaggccatgtgtcttttggcagtcagtccagatgggaattggctagctgcatcaggtaccagtgctggagtccatgtctacaacgtaaaacagctaaagcttcactgcacggtgcctgcttacaatttcccagtgactgctatggctattgcccccaataccaacaaccttgtcatcgctcattcggaccagcaggtatttgagtacagcatcccagacaaacagtatacagattggagccggactgtccagaagcagggctttcaccacctttggctccaaagggatactcctatcacacacatcagttttcatcccaagagaccgatgcacatccttctccatgatgcctacatgttctgcatcattgacaagtcattgccccttccaaatgacaaaaccttactctacaatccatttcctcccacgaatgaatcagatgtcatccggaggcgcacagctcatgcttttaaaatttctaagatatataagcctctactcttcatggatcttttggatgaaagaacactcgtggcagtagaacggcctctggatgacatcattgctcagctcccaccacccattaaaaagaagaaatttggtacctaaaacagggcactgtctgtgtccttccttgaactgtctaccctgttgcttttcacaaatcatggtaataaaacaagttattcttgagg

SEQ ID NO: 18751 - protein, 686 aa, Homo sapiens
MGEFKVHRVRFFNYVPSGIRCVAYNNQSNRLAVSRTDGTVEIYNLSANYFQEKFFPGHESRATEALCWAEGQRLFSAGLNGEIMEYDLQALNIKYAMDAFGGPIWSMAASPSGSQLLVGCEDGSVKLFQITPDKIQFERNFDRQKSRILSLSWHPSGTHIAAGSIDYISVFDVKSGSAVHKMIVDRQYMGVSKRKCIVWGVAFLSDGTIISVDSAGKVQFWDSATGTLVKSHLIANADVQSIAVADQEDSFVVGTAEGTVFHFQLVPVTSNSSEKQWVRTKPFQHHTHDVRTVAHSPTALISGGTDTHLVFRPLMEKVEVKNYDAALRKITFPHRCLISCSKKRQLLLFQFAHHLELWRLGSTVATGKNGDTLPLSKNADHLLHLKTKGPENIICSCISPCGSWIAYSTVSRFFLYRLNYEHDNISLKRVSKMPAFLRSALQILFSEDSTKLFVASNQGALHIVQLSGGSFKHLHAFQPQSGTVEAMCLLAVSPDGNWLAASGTSAGVHVYNVKQLKLHCTVPAYNFPVTAMAIAPNTNNLVIAHSDQQVFEYSIPDKQYTDWSRTVQKQGFHHLWLQRDTPITHISFHPKRPMHILLHDAYMFCIIDKSLPLPNDKTLLYNPFPPTNESDVIRRRTAHAFKISKIYKPLLFMDLLDERTLVAVERPLDDIIAQLPPPIKKKKFGT

SEQ ID NO: 18752 - DNA, 1983 bp, Homo sapiens
  CDS (29)..(637)
gcgagcctgcgttttccggccagaggacatgatgcagggggaggcacaccctagtgcttcccttattgacagaaccatcaagatgagaaaagaaacagaggctaggaaagtggtcttagcctggggactcctaaatgtatctatggctggaatgatatatactgaaatgactggaaaattgattagttcatactacaatgtgacatactggcccctctggtatattgagcttgcccttgcatctctcttcagccttaatgccttatttgatttttggagatatttcaaatatactgtggcaccaacaagtctggttgttagtcctggacagcaaacacttttagggttgaaaacagctgttgtacagactacgcctccacatgatctggcagcaacccaaatccctcccgctccaccttccccttcaattcagggtcagagtgtgttgagttatagcccttctcgttcgcccagtaccagtcccaagttcaccaccagctgtatgactggttacagccctcagctgcaaggtctgtcctcaggtggcagtggttcttatagccctggagtgacctactcgcccgtcagtggttataataaggtaatgactctcttctcttgtctagtcacattattttagaattgagaggtatactaaaaatcatctaatgagtcaaaacttatcagtgagcaaactgagagttgatttgcccagaacacccatttaaaaaccgagaatagaacataatatcttaaacacaacatcttaaaatgaaagagaaaaaattagcatttacagagataacaaacttagtgcaccatctacgatctttcagctgtctttaaaacaagttgaaacaaggataattttttactttagttgcttttactcctgttttccctcttgctttccttcttcatgtgaggcctttgtatacctttttagagttttagtgtggtttatcatgttggagtgtcttctaagctaaaagctgagattgtcacatagtttctttttttttccaatgagtacaaatgattcttgaatatggacgctttccatggaatagtaggaaccttcatttccactcccacagtaatgtgaaattttgttctaatttttaggattaatagaaacaggattgacaaattgaaattttgacttcttcttgaagcataaaactatttttttttttttttttttttttttttgagacagagtctcgctctgttgcctagactggagtgcagtggcgtgatctcagctcactgcaaactccgcctcccgggctcatgccattctcctgcctcagcctcccgagtagctgggactacaggcgtccaccaccgtgcccggctaattttttgtactttcagtagagacggggtttcgccatgttagccaggatggtctcgatctcctgaccttgcgatctgccctcctcgacctcccaaacatttacacatttctttgtaatgaaattccatactactggttatccaatattaaaattaattttggcaggtaatagaattttgaaaattttgtacaagttaaatttttatgagaaagtatatatgtagtgaaaattaataactcataggtaaatgtgacttttaaaaataatttttcacaagatgatactatatgatccttatagaaaattggaaaagtaaaacagaaggaaaattattatagtcctgccacacaaaaataatctgtttaatggctatttaatactcatctaatggatataccataatttactcttgaatgtttaagtcattttcatttataaaaaaactttttaatgtatactaaatagccctgtacataaaattattgataaatttgggatgggagtgtcgatccaaaagaattgtaccaatttacattgtcacagaaatgtagaagagtgtttgttttaccacactgttgaccatcaagttaattttttaaaaaaataaatctctgctaataag

SEQ ID NO: 18753 - protein, 203 aa, Homo sapiens
MMQGEAHPSASLIDRTIKMRKETEARKVVLAWGLLNVSMAGMIYTEMTGKLISSYYNVTYWPLWYIELALASLFSLNALFDFWRYFKYTVAPTSLVVSPGQQTLLGLKTAVVQTTPPHDLAATQIPPAPPSPSIQGQSVLSYSPSRSPSTSPKFTTSCMTGYSPQLQGLSSGGSGSYSPGVTYSPVSGYNKVMTLFSCLVTLF

SEQ ID NO: 18754 - DNA, 2212 bp, Homo sapiens
cttcaggagaggatctgtaagagtacacaaacagagtgagccattgccatagaatattctcttgacaggaccctagctcataaacatttcttcagaactatacttcaaatgggatgctttgtattaaaactttaataaatttaatttattttttcttttgaatataaataactgagcttaagcattatcatcatatcgatttcttatgctgcctaaacctcttaattttagtcgaaatatatctttttttttttttggaggcggaatttcattcttgttgcccaggctggagtgcaatggcacggtctcggcttaccgcaacctccgcctcccgggttcaggcggttctcctgcctcggactcccgagtagctgggactacaggcatgtgccactacgcccggctaattttgtatttttagtagggacagggtttctccatgttggtcaggttgctctcaaactcccaacctcaggtgatctgcccgcctcggcctcccaaagtgctgggattactgagccactgtgcccagcccaaaatgtatcttatacaaacattgtagaaatgaataatgattactcaaataagatcttttaattataagcttctggcatctctatttttcccttaagtaggggatactaaagtgaatgattttctaagaggatcttttgaaactctttagtacaatatttgagtaaaataaattattgtggatcttttgaaactctgtgtagtattcgagtaaaataaatatttgacatttacagtagggtacaccctaagttgtttatgaattccttataccactgttatatttaatttttcagataaaatatgtatgggaaaatgactagagaaattgattcttttttaggctcagggacaagataagtgactaattatgaaccccaagctctaattgtatgttcagagtgatgtctccataaaattacaaatgtcatgtactttcagggtagctccttatttagtcagaaatctcagagattaaatgtgtgaatatttagggtttttgcatatttttgaccaaccaatgaaagcgaattagttcagtttagaaagtttgatgtctatacttgtatatacctctttaaattttagaacttcgtaggttattcatttttaaagagcaataaagtttgtataagatagtgattgctttccttctattctttaaatatcaaaaatagagtatctctctgtcttcactattctcatccttggacatttcctctcccctccccttggtattctcttttttgaggggggggtgttctaggtgagttaatccttagtattttcagtagtcattgctataaaactctcagcttcccctccatactttcaacctaacacttctctctcccaacttatctctgtgtaatctcccagttcatgattaacaaattataattttattgagggactgttctaatcctgatatctcagattttcttggctgttatctccctatctttctgtattctatgtcagtcagagccaaaatccttttcatcatcccaaatctttctatccgccacatcactgattcatacaccctagtcttccatcacagtctcttaatttttaagttttttttttcttactactcctttcatacttattctttaatttcatggaaacactagagtagctatcttaaactaagactacagaccattaaaaagtcagtttctcagccaggcacgagaaactactaacacctgtaatcccagcactttgggaggccaaggcgggcagatcacgagaggtcaaggagatcgagaccatcctggctaatacggtgaggccccgtctccactaaaaatagaaaaaattagccaggcgcctgtagtcccagctacttgggaggctgaggcaggagaacggcgtgaacccgggaggcggagcttgcagtgagccgagatggtgccactgcactccagcctgggtgacagagcgagactccatctcaaaaaaaaaaaaaaaacagtttctcagtccatgtaaccacctttcaaatgatcagtagccacatgtggctagtggttaccatattagacaattgaggaaatattgaacatttccatcatcacagaaagtacggttggactatgggccaaatctagcacaccacctgcttctgggtggtcttcaacctaagaatagtttttacgtttttaaatagttg

SEQ ID NO: 18755 - DNA, 3193 bp, Homo sapiens
ttttagattttgaaatttagggataatagctcttaggtttgggtaccactttgctgcagtttaagaaagggggaagggaactcatttattaaacatcaatcacgtgctgtgttctgtttgttttctagtcatcatatcacacacctttacgacagctcactgaaggaaggtgatactgttcccattttgtagatggaatagacaaaacctgaatttaagtagcttgctcaaggttccatattgaatatggaaagttcaaatcatctcagtaatgaatataccatatatacttgctgtattgtatctatgataattcagttacccacaatacccttttaaatttctgttaatgacatacctttaaatgtctccttgatgaacagaatcatggtctttaaaaacattttcatgggttgattgcattttcaagctctaaaggattgaaagataaatcttcacgttaaaggtgagagtgaagtatctgctcttgggttacagaaccagatagtactagaactaagattacagggtaaagctgcttttatcttttttctttttctttttcttttttttttgacatggggtctcactgtattgcccaggctggaatgcagtggcatgatctcagctcacggcagcctctgcctcttgggctcaagcgattctcctgcttcagctttccaagtatttgggaccacaggcgcacaccacaggcctggctaatgtttttgttttgtttttggtagagacggggtttcaccatgttgccaggctggtctcgaactcctgagctcaagtgattcacccaccttggcctcacaaagtgtcaggcttacaggcgtgagccactgcgcccggctcacagggtaaggcttctgtctggtgtgttgtattacggattttgcttaataggcacagtgaggcattaaaaagaaaattcagtatgcctgtagaaaggataatccttgtttaaagtctccaaattgcagtcaaagatgttttgactgtgcctttttttgttcccctgctgtcccttatgtagacttctgtcagtacccatggcagcctgtcatcttgttgacatctccttctggactgtgagctctgtatctggcttgtttttcatccccagcttctagttcacaattaggtagaaccctattactctttgaagaaggaacaagaaaatgtgggccagttttcatttgccattcttccatgtgagttagtatggttcgtaagtattcctggtgatacgctagtattggcaattctgtgaggttgaacaaaggggtggtatggtgtgctagcgtgggaattaggagacctctgggtcttgacagtgccctggccactaagcaaaggcagttcatccttggagtctcaatgtgcttttttgttaattgagatatgcttgaagtatcagccctaaatagtctgattctgtgacctacaaacccttacttaattcagtgttactataaatgattcttcccttaaacctactttttacttagcaaaagagaaaaaaaaaaaaaggaaacgctcatgtcaggctgcctgggtttgaaccccagatcccctcttagttggaggcaagttgtatgatgcttcagcttttggttcctgcctcctaaggttgttaggagttactgtgtgtagctgcttagaacattgcctgggtctcagtaagccgcttaagtgactgctctcattttcgctgtaaagcaccatactgtaataacatcccatgaagcatggggcggggaagagtatatggtaccttatggactttgatgtggtggggtagtaggtaaattctgaatatgtaagctacatagtattctttttgtaactaaaggataaaagttttaagatgggcatgtaatatggctagcactggattttaatgatgagccagagtaataaggctggcaaggggagtttttgttttgtaataaatctcttacacctgcacatccagttctttttaaaaacacgtttgaagaggctccatatttctcagtgaagctgttggggttcatgttatttttgaaaatcatcttgcaatttatttcagcatcagactgaaccacccaaagaaaattagtctatttctgaacagttttttcagaaaccatattggtctgatcacccaacatttatagaaataggcgcttaaggcctagaggcatttcagaaaggagaatgagaaatactgtggtcaagagtagtgttcagatggagaacatcaagcatctgctctgcccttccacacacatcctcatttcatcttcacaactgccctaggtaaccttgttatctgtaatggaacagcctcaaggagcacagaggcactcactcctcacgtttggtctgttgccatttccggcttggttggaatagggtaggagccttttggcagggagcacattctcagtaatgcagagtgcactcacctgggttctagcttcaacacttaggatttgcttgatattttgtattctctgaggcactgcctgtatttgtttctgctatcacagtccagagtcaagcttcatttataaagactgggcagggcatggtggctcactcctgtaattccagcactttgggaggctgaggtgggtggatcactttaggtcaggagttcaagaccagcctggccaacatggtgaaaccccatctctactaaaaaatacaaaaaggccgggcacggtggctcacacctgtaatcccaacactttgggaggccaaggtgggcagaacacctgaggtcaggagttcaagaccatcctggcgaacatagtgaaacctcgcctctactaaaaatacaaaaattagccaggtgtggtggtgcatgcctgtaatcccagctacttgggaggctgaggcaggagaattgcttaaacctgggaggtggagattgtggtgagctgagatcgtgccactgcactccagcctgggagatagaacgagactccatctcaaaaaagaacaaaaacaattagccgagcgaggtggtgcacgcctgtaatcccagctactcatgaggctgaggcaggagaatcacttgaacccaggaggaggaggttgtagtgagtcaaggttgcaccactgcactccagcctgggtgacagagtgagactgtctcaaaaaataagtacataaataataagtaaaagctactaac

SEQ ID NO: 18756 - DNA, 2656 bp, Homo sapiens
agcatcgagtcggccttgttgcggaacggaaccactgggccgcagcgaccacaggggagttcttcgccggccgcaggttcaaagcgatctgcaatgagcgcctttaggaattcattcgaaggcgcaaaagaaaaagaaattaaggcaggaactgagcgaggaaggaagggagggaaagaaaggaagaaagagaaaaagagaaagaaacagaaagaacaggcaaaagctgaaagggtcatgggaggaggctgctggttccagtgaatggcgctgaccccactgagatcaacaccttgctggaggcctcaaacactgaaagaaagacatgcaaaggaaataattcaggaccaactggtgggctccaaaaatctcttctatgaggaaggtgaatgcaggctctgctacgtcctgcctgtgaaagaatcccttcaggaaaccagagcttccctcgtttaccttttctcctacaaagggaagcagcctggaagaaagagtccagtacttgacccatgcctcaacaaactctgctatcaatatggtgcagcttaccaaaggtcctagaactttgtcaacgcacttggagtaatttttatgaaatattgtgtgtgataagcaaactgtggaaatttatataagatgttggtggcatagagttatacgattgtgtattaagggtagttttaggatgtcatttttttttcagttcatcatgacagaagtccttttcatgagagaagtcacatgagaaaaaactttcttatattgtaagctccttctatagtggtatgtgcatttaatgacatccaactaaagatggtgtaataccacggtggtttgacttagagttttttaactttatatctggtttatctgggtattacatgcgttttaaatgtggatcttttcaacttacgatgagattatcaagacatagccccatgctaagtcatgagcatgtggacttataatggttcaatttagatttttcggctttaagataggattattggggcttacccccatcttaagtagagaaacatctgtattgtgtaatactatatgatgtacatttttctgttttcctattttcgtgcatgttgatgtaagcatggaaaaattttaggaaatgtatttattaggctgtttacatgggctgcctggtgcaaatcagcagtcaaaaatgactacatacacaactagcaatgggaggagaaatcctccctctgtgggaggcactgactacattccagttctccctcctacgcccagagactggaccagggtttgatgactggcaacttctcaaggggccggtctgtcttagttgatgattttagaggtatatagaggtatttatttacaaataaacaaatatttatttataagtagatgtttacatatgcccaggattttgaagagcctggtatctttgggaagccatgtgtctggtctgtcctgctgggacagtcatgggactgcatcttcgtccttgtccacagcagatgaggacagtgagaattaggttagatctgggactacaaatagcttctctttcaagtgccattacagctgaacattagtgaatcttgggccttctttgggctcagggcagagcaggtgtttatctgccccggcatctgctatggcatcaagagggaagagtggacggtgcctgggaatggtgtgaaatgattgctgactcaggagtggatgggcccctctcgcttctggtggtctgtgaccctgagcccctgagctgcattttacggtaaagattcctgagctgcagcatctgactcatctcagaaatatcaattcttaaacactgtgacaacaggacctagaatggctgacacattaaggctttgtccttgtgtcacgctctattattttatttaaaaacttcagtaatcattttagcctctttccagcaaactcttctccatagcagtccagtagtggtaggataaattatggatgtagtcgttcaagggattttggtcttttccatctcaagccatgtgttttgtcttgttccgggactggtttggctgggacaaagttagaattgcctgaagatttaggcacattcagtgttgtgtccatggagttttaggagggggtagcctttctggtctttgcacttccatcctctcccacttccatctggcgtcccatgcgttgtcccctgcacatctggaagacacaaggtgctgctgccacctggtctttgcttttgcagggccttctgtgcaggacacttggcctcaaagcccagagggagccagtccagccccagctcccttgtgccttccgtagaggccttccttgaagatgcatctagagtgtcagccttatcagtgtttgttaagcttattcttttaaagtaagcttcctgacaacatgaaattgttggggttttctggagttgtttggtttgtatgggatttgctttatccccaagccaaacagcacatgacacacgacagccacttaagacagtgtgtcactcgtggttagagtcctttgatgtttctgccctatggaccctatttgaagactatgttgtaatatcaaacaatacaaggaagcacgttatacagaaaatgctcatatgtttatgaattttgaccaaaataaatagaaatcttatatt

SEQ ID NO: 18757 - DNA, 2582 bp, Homo sapiens
aggagaagctgatgaagagctagttgatgatggagaagatcagaatgatccctctcgatgggatgaatcaggagaagtttgtatgtctctagatgattaactgacctactatactcctcaaggatgctgcatttggacctaatatgaatcgacaatttggattgttgaacttgaaggcttgcaaaatatggtacatgctggatagtagttatgttgctgtgaaaactgtagggtcaaagccttatagcaaaaaaaatttttttttatatttgcacaggactatacagcaaacaaccatgtggttggattacatggagtccccacatactcagtcagttatcaaagtaaaatattttttatttataggatatacagtaactatttgggtcctatgaaaatagtccttaaagagcttacattcatgtgctactttaacatgaatggagaaaatccgtttatggaagtacagtgacaattgacccaatcactctgtccatcaaaccactcaggctagtttgtactagtagagttttgtttctatttttatttttattaattttattttttttaatacagattttcagtgaggggctttttcaatcccattggttctattttcttgtatttttccatttaatttgcttcataacttaaaccaagtctcttctagtcttaggtattatttctcgattttgtgctgatgggcatgtttataagaactggactttttgacatgaattttactacttcacaaatgaagaatgatgttatgaagttaccgtggcgaagttgacaaataccactaaaatgattatgatttagaagtaactttcttctgctgctctaatctgataaatggttactatatgatattttctgacatggtatttggttttgggtatctgttactttggcactattcttgtttgcctctttatttttgccagtgtactatacctcagtcctatttgaaagacctaattgaaagaaaaatcatagaaataagtaaaatgatttgttttataatttatccaccatgtccagtttggttagcttgttatgcaatataagtgaaatatcaggtttttacccgtgtcccttttatcatgaaaattaacacaaaatgtgcattctcttttgtttcatacttagcgggatattgattgttttgaaattatgatcaatacttaattcatttttttctgtccttgaagtcactacaccttgatacagtctttctagtagtcaccatgattcaacagtctcaaaaatcttacaaataaaattctgagaagctttattattctataaattcttcagggtacaaagggtgacatattgaggtgaaattgtcagatttacttagcctggtgacatgaattagctgattgtggaactctcagcagcatttcacgtattgttaacatgtatggcatttattagcatattgtatattatataagattgagggatgtcatattttcagctttcttttaaataaaaattgagtatattttcctattttatatcaggtaactaaattatgctagttatgtggaaaaaattgcaaagatgctttgacagatataatccctttggtgctccatctgatcaaagttgaaaagttgatgttttttaagagacaagctttatcattgtctctgatttcagtagaataatggtttattgttagacaatgatgtttctgcttggataaatcaaagataaattacagttacatggttagatgcatcttttgtcatctatattgtagtttctacataactgtaaacctgacagataagaatagtttcggtttgatttttgtttaaaacagatgagtacttcttaatgttctagacaaatgagtaaaatgtatttctggtagaaattagttgggcaaagatactatgaatgaaaaagtattttaaacgtaaaatgttctttgtgaatatgtaagtatagtataaagatttctttcatcccatttatccccttcctttaaataaactagtttacaattggtagatctgtctatatataaatatatattaaagaacaaagatatatatctaaaaatcacctaaatctgctttattagactacagttcacttattgcatagaaactggacttggctttacattcttaatgtacttttacttttcctcaagatatgaacttactctcttgaagctgaattttcttttactacttaaatcatttatgtatatctggtaaattatgaccaaatttttgttagattgcatacagtaaattgaaatacacacttggtacactacgggattgttgtgcttttgtttggttttagttggaaataaggtttgatgtagatggcttgttactgttaatttaaaatattctataattgtccattactttatgttgtgttgtgacagatttggctatatttttagtcaattgaaatatgatactttaaaagtttgtttttaggtaatccaaaggaaaagtgtttatactcttgaatatattagcctcagcctatataaaaatttctttgaagtaaacattttaccggaaacagaattgacagatttttct

SEQ ID NO: 18758 - DNA, 2794 bp, Homo sapiens
  CDS (83)..(2170)
atgtcaggttcaaggaaaggacccttccgtggacatcactcaggaccttgtggatgaatctgaagaggagcgttttgatgatatgtcatcgccaggcttagaattgccatcttgtgaattaagtcgccttgaagaaattgcagaacttgtggcatcatctttaccttcacctcttcgtcgtgaaaaacttgcactggcactagaaaatgagggttatattaaaaagctcctggagctttttcatgtgtgtgaagatttggaaaatattgaaggactgcaccacttgtatgaaattatcaaaggcatctttctcttgaatcgaactgctctttttgaagttatgttctctgaagaatgtataatggacgtcattggatgtttagaatatgatcctgctttatcacaaccacgaaaacacagggaatttctaacaaaaacagccaagtttaaagaagtgattcccatatcagatcctgagctgaaacaaaaaattcatcagacatacagagttcagtatatacaagatatggttctaccaactccttcggtctttgaagaaaacatgttatcaacacttcactcttttatctttttcaataaggtagagattgttggcatgttgcaggaagatgaaaaatttctgacagatttgtttgcacaactaacagatgaagcaacagatgaggaaaaaagacaggaattggttaactttttaaaagaattttgtgcgttttcccaaacgctacagcctcaaaacagagatgcttttttcaagactttgtcaaacatgggcatattaccagctttagaagtcatccttggcatggatgatacacaggtgcgaagtgctgctactgatatattctcatacttggttgaatataatccatccatggtacgagagtttgtcatgcaggaggcacaacagaatgatgatgatattttgctcatcaacctcattatagaacatatgatttgtgatacagatcctgaacttggaggagcagtccagcttatgggcctgctacgaactttagttgacccagagaacatgctagccactgccaataaaacagaaaagactgaatttctgggtttcttctacaagcactgtatgcatgttctcactgctcctttactagcaaatacaacagaagacaaacctagtaaagatgattttcagactgcccaactattggcacttgtattggaattgttaacattttgtgtggagcaccatacctaccacataaagaactacattattaataaggatatcctccggagagtgctagttcttatggcctcgaagcatgctttcttggcattatgtgcccttcgttttaaaagaaagattattggattaaaagatgagttttacaaccgctacataatgaaaagttttttgtttgaaccagtagtgaaagcatttctcaacaatggatcccgctacaatctgatgaactctgccataatagagatgtttgaatttattagggtggaagatataaaatcattaactgctcatgtaattgaaaattactggaaagcactggaagatgtagattatgtacagacatttaaaggattaaaactgagatttgaacaacaaagagaaaggcaagataatcccaaacttgacagtatgcgttccattttgaggaatcacagatatcgaagagatgccagaacactagaagatgaagaagagatgtggtttaacacagatgaagatgacatggaagatggagaagctgtagtgtctccatctgacaaaactaaaaatgatgatgatattatggatccaataagtaaattcatggaaaggaagaaattaaaagaaagtgaggaaaaggaagtgcttctgaaaacaaacctttctggacggcagagcccaagtttcaagctttccctgtccagtggaacgaagactaacctcaccagccagtcatctacaacaaatctgcctggttctccgggatcacctggatccccaggatctccaggctctcctggatccgtacctaaaaatacatctcagacggcagctattactacaaagggaggcctcgtgggtctggtagattatcctgacgatgatgaagatgatgatgaggatgaagataaggaagatacgttaccattgtcaaagaaagcaaaatttgattcataataatggcaacggcctaggatcagtacctgttgaaaaaaactggttctccacccctcccccatacaaaatccacaaaaaagcgcagtggtctcttgtgaatgactgacacagatcagcctcttacacttgacttctgctcatcaagtgccaattcaatggagcaggaggaggggatatcatatatttaggggaaagacttaagcctttgagctctccagcttggaccacacattgcccttttctcagggaaggaaatggaaacaaaaagccaacagggcaggggttttgtaagtggaactctggattgactggtcagttgctacaatcagaatatgctttcttggaccatgtttgagactcagaagaatgggcctttctgccataattcttcactagtcaagaatgccagcagtttctttgtataaagagacctgcctttaaaatcatacattctgaacattttagtcaagctacaacaggtttggaaaacctctgtgggggaggggcgagtataaagttttcctctttttttaactgttccctttgcccttcaaactgcagatattttttttttttaagtggggacttctccctacttgattaaagattgagtggaattct

SEQ ID NO: 18759 - protein, 696 aa, Homo sapiens
MSSPGLELPSCELSRLEEIAELVASSLPSPLRREKLALALENEGYIKKLLELFHVCEDLENIEGLHHLYEIIKGIFLLNRTALFEVMFSEECIMDVIGCLEYDPALSQPRKHREFLTKTAKFKEVIPISDPELKQKIHQTYRVQYIQDMVLPTPSVFEENMLSTLHSFIFFNKVEIVGMLQEDEKFLTDLFAQLTDEATDEEKRQELVNFLKEFCAFSQTLQPQNRDAFFKTLSNMGILPALEVILGMDDTQVRSAATDIFSYLVEYNPSMVREFVMQEAQQNDDDILLINLIIEHMICDTDPELGGAVQLMGLLRTLVDPENMLATANKTEKTEFLGFFYKHCMHVLTAPLLANTTEDKPSKDDFQTAQLLALVLELLTFCVEHHTYHIKNYIINKDILRRVLVLMASKHAFLALCALRFKRKIIGLKDEFYNRYIMKSFLFEPVVKAFLNNGSRYNLMNSAIIEMFEFIRVEDIKSLTAHVIENYWKALEDVDYVQTFKGLKLRFEQQRERQDNPKLDSMRSILRNHRYRRDARTLEDEEEMWFNTDEDDMEDGEAVVSPSDKTKNDDDIMDPISKFMERKKLKESEEKEVLLKTNLSGRQSPSFKLSLSSGTKTNLTSQSSTTNLPGSPGSPGSPGSPGSPGSVPKNTSQTAAITTKGGLVGLVDYPDDDEDDDEDEDKEDTLPLSKKAKFDS

SEQ ID NO: 18760 - DNA, 2955 bp, Homo sapiens
tgtattgtgactatcagcattctggtgcaaatgaacttttctccatcatcgactgtggaaaattgatacttttaaagcatattcttctatgagcacaggtcctcctagtgaagcttagtttgacaaagggtgtcatatgctttcctaacctgatttgtagttaacattcacagagcctacattttctcattagggttatgatgctcagtatctttccaagtgccaggcacgggcttccttttctgatcaaacataccattttttgtatttcacaactatagacagtcacttctgcagtcccaatttaaaaatgcagaactgctttatccaagaatgctgaaaaatactgttctatccaggtttcctaaactataaaagcagattttgcttttgtttgttaatcataggcatggccgagcattgtggattagcctgaggcttaaaatcagatgcatgtctggtaagatgaccactgtctcactatcaagagcctgcagagccattttccagacctgtgattgcccagaacacatagtccccacgtttctaatttggagcaaatctaaaaggtgctgagggattggacagctctgactttcctcgagactatggatatagtccttctcggattagctggaaatggggacagagttctcatttatcccagacatatacattggcttttttggaatctacagattgagattttgatgaatttatattggttttaatgagacccaaatgactctctcttaacaattcaagcagtagacaaagttgctcacaaatacagaaaacatctttttgtctacttcgcaagtatcaaaacgtgataatatttaagcccatttgtagaagaaatcttgtatatactatattacaccttgatatctatacaaaacatcacttgtattaaaacatgtagataactttctggcatttagaattttgttccattcatttgatttgttcatctgagaattttttttttttgcctgaaaacccattaaaagaaaacgtgccttctgtataagtttatgtttattcctacattttatacatttttaatgtatgggtaattggtggcacgtgactttacataatgactttctagactctgaaaaaaatgcttttatcatttttgcaattcagacaagggtaaacattttactttatgtaattgccacatcccaagatgtaaaacggcagtaatttatgaccacatatggaagaaattcttcaaatagctaccttacatttctgcgtatatatgaaaactgagtgatatttctcagtgtatttgcttgcatttgaatggttcaattctgttgtgtttatgtagaaaattcacaaatctgttcatttaattttttaatttgagaatttttatttcttttgactgaaaacacattagaacctatgagtaaattctgaaggttttaagatttacttcagcttgtcaccagtttcaaataaatccctaataggtaacaagtaaaatacaaattcttgtctactttcatgtggttttaaatggcagggacttcgctgagtcagtaagtataatcactctagtttattcaaggatgtgtggcaactttcaacttccatacgtatatatgtatgtatggaaggccatgtcaatactagtatcattggatataactttgattcttaatcagagggcaaattcattagagaagaatctttagtagatacacagactaatatttgtgtggaggttcttttgaccaattttattcctaagaataaacaaacccctacagttaaaatgcaaagatgcctgtcatctaagtattgaaagaatttttgcctttcaagagttgttttttaaaaatttaataaattcataaaaaagactcatatctctgcaaacaaaagaagggcagatactgggcttctacatgctatccttaagagcttctccccctcacccattcctagtgctcttggtatacacttgggaaaataatgtcctccaggagaaagtgttagagggaactaacattttaggaatgcttattcagaaaaaaatcctagagttgattcattgttttcctccatcctgcaaaagaagatccctttgttaagcagctcacttggaaatatgattcttggagtcaatgatctctaaacaaactggattatcaactatttacaacgtctatacagtataaactacctcacttgcctttcttgggaaaaaaaaaatgaatggactttaacaattgttgttacaaactgtgcctgaatcttattatttaaatcacttcagttagctttcagtgtatgtttaataatatacatttaatgatgaaaaatattttcagcaaagctttaaaaccagaaatactgtgtaactgtgatctatgtggtatactctgagagaattctgtgtcctgctcattgtcttgagtttctaaccatgtgcagatgcaagcgttcgggagtaggaattaatgtccatcttttctttcaggcattttcatctgctgtccacgtatttcacttgactgaaagctcatatgagttaaaatgtcccttcttcctagcgagcatatttcaactgttcttcataaatgtttatgtgccttaaaagactttatgttaaaggattaaatagtttctctgacaggcagtttttagctgttttccacaaataaaaataatatgtcatgggattaaaatgtttgttttcaagcatttttaacagttttacacacttacatacaccttaattaaaaattttttttctgtcagacatttaccattttctaaaactaatttgacaaatcatgacactagaaaacgccaatgttttatgtctttgcccatctcaaaagctaatattgattcttctgtcccatcagctttcattgttaagtagaatatgtatgttgcattttatccataagaaataaagagaaaaaaact

SEQ ID NO: 18761 - DNA, 2879 bp, Homo sapiens
agttaacagattcttgctcgatagcttgtttgtgtctgtcgtgttattagagggaactccactatatatggtcacttgaaattatgatgcaaaggtttctcttgcattgaaaccctcttggatattacagtatttttaattgaaagtcctaattctgttaaggaaaggagttgattaaattttaaggtaccactggtattttgggagattataatcagtttgttttcaagataatagaaaataaggtccatgagaatagaagttatgtgatttcagtgagttgatgtgtacagcatggctgtgctccatctgatttaccccattcttaagttctgagagtatgttctcaaggaagatttaactctctttggttttaaattactttttaaccagcctaataaataagtcttactacttttcataatatttcataatagttaaaagtaggtgtttttttcgtgctcaatttggcactcaaaataatgttcattatggaagtttggtaatactgagcaagcctgtggaattttctttatgaaaaatgattttagcctttgcaaatgttaaccatgtgaaacacattttcagtataagtatgcgttacagggtttgatactttcctgcacttaggtttgtcctattcttcatttattcatactaggatagaaaattttggaatcagaaaatagatccagtgtttagctacatacaatctagtacaagtgaatttttattcttaaacataggtgtgttggctctttttttaaaagatgcgctctacctgaaaaggaaattggattttagaactggatgtggtgcggtgaagtattttaggcccaggtctgtgtacacattttatagaagaatgaagtactctgaagtattttggttgccttttcatttcaactgtgttttgaatttgtcagatcacacatatattgtgttattgggcgctgtggtatcttttataaaacctcttgcttgtgtgcaaaagttcctaaaaggaaacacaagtaatgcctatccattactagcatgctatgctgcatgctttactgccattgctgtatgctttactgtctttgtaaaaatcccccctccccttttctggtaactggaaaagcatgctaaaaatagtcttatattttcaccccataagtgcagaatcagtaattccttggcttaaagctcttatataatcaatattattggtggtaaataccaagtttggtatctcatagctatctttttttaaagaaattaagttcttgaaaatttagccaaatcccgttttatgggaatgctctttagaattcattttgttcagcccctttgttctatggttgagaaatctgaggccttacgaaggttaagagaactttccccgtgtctcacaggtaggtagaggcagagctgggactagatatctggtctgttgactctagctcagtgtcttctggtaactgttgaaaattgtcttagtttgagagatggctgaaataatgaacataaaatgctatttataataacaagtatatgtgaaatttcttattgtaagactactaccggcttactgttgaatagtttggttatagtgtttaggctagaaatgcctcccacattggtaataaacattacaaaatacaatgtatttttaggtaggcattttataaaatgcattatgccatggttgcttttgagatagattgtagtctgggtagcatctttaaaatgtatgtgggcttaactgttgttcatatcaggagatgctctgattgtataggcgagactctgtttctgttatttttaattgctgtatgaaatgtgatcagattattttactaccaacagttatagtttgaaagtccaactgtattaattgactgataatatgataatatagagattaaattgtttgtcttcattccttatatgtttagaagtttttgctttgtctgcctgcttacttgtatatgtaagcatgagggaaatacactgttgctaatactgaaattacaatcaagtaactaaggccttgagttcatatgtgacactgaatgcactagcttccttcgttctataactaatgtaccttaacttcccccattcttatatttacaggaagctaagtcattatgttctgagtgtgtggtatgttcccttaaaaaaaaatgacacttggaagaaaaatgtatgaaattcagaaattccgatcaaagaaaagtaattctttcttttttttttgagacagagtcttgctttgttgcccaggctggagggcagtggtgtgatctcacctcactgcagcttccgcctcctgggttcaagtgattctcatggctcagccgcctgagtagctgggattacaggtgtgagccaacaagcccggctaatttttgtatttttagtagagacaaggtttcaccatgttggtcaggctgggctcaaactcctgaatccgcctgcctcggcctcccaaagtgctgggattacaggtgtgagctgccgcacccagccaagaaaaataatactcttaaatacttagatgttcacctaaagttgatattatttggtatgggaattacttttgaactgtgatctttcagattacaccactttgaaaacaagttttaacagtagggtaaaaatatagtttttgagggtattcccaacttgtgatcttctaccactttagagacattcaagtaatagttttcttagagctttgcacattcctattcactgagattttaaaaatttcacctttattagagggaaggatcaatgcttattaccatttggaaaaacgaagatcagaaggtaaatgatctttattttctagctttaaagggaaattaaaccattcatgaataaacttt

SEQ ID NO: 18762 - DNA, 2256 bp, Homo sapiens
  CDS (988)..(1431)
tctccccgcccgccggcccctccagcctcctccaaggcggcggaccaggccgggccggagttttcggggttcagcccgcgagcgggaggaccggggaggcgagggaggaggaaggcgagaagggccagatcgcgggagagcccaatcacggggcgagctggacctggctgtgatcatttataatccttgactcctccgctccgccacttgtcaagatgacaggggtcatccgtgaataacacttcacgctgatgaatggctcttgccggctttcggctctgatgaggggtctgcccgccgccgattgaaaacactaatgaacttactgcgccatttgaaattcacacgcaccaacaaaatggggggtgggcatttcaggtcagctgagtcacccgaggaggtggcagtgcaagacactgccgggaagacggattccgaggcagaagggtgtaattaaggatttccacccccggtaggcggcccgtcctttgcagagcctctgaaaatgacccgcgccttcctttccacagtgttctttcgtccgagaccgaaaagcgcaaatgacctttggacagggaagggaggcagtaaacactcagacttccttaccagcccctggtgggcactgcagcagaacaattgtctgccccccaggttcaagcacctaggcctccgccccgcatcacctggccaggggcggacccgggagtcctccgaaggctccactccccacttttactactcttctttcctctccattctcccctcagattagcggccggacactgtccctgcctcgattttgtttgctgtgggaaggaaaaaaaaagtttgctgctcctcccaagacactggccactttctactcactgaagttcccaccgcagcgctggctcccggctccctagctcccgccccctgtctgcaggaaagccctcccccggagcttccgaaactgctggaggttccagagttttgtagctccgaatgggcgacctgagccgaaccgctctctggctgggtggtcggcgggatccttcaggctcctttcgggtccgggacggggcggcggcagaggtggggcgtgcgtgcttggggctgccgagtgagtgcggctccctggtgcgcgcccgagcatctccccgccctctcctgggaccagcagtctgcccgtggagggctaggagcccgcgaccaggcctgccccggccgtcgccaacctgtccttggaagcgtggcggagactggtgcgctctcagcctcgtcgcgccagccgcctcgcgccaccctccactttcagcttcagagcagaggattccgccgacctccacctgtacctgtactcggccgttaggaaatccacttgcatttttaactaccgtgcagaaccagaaacagatcgagcactgggagaacaaggacgacgcctcctaggaaagcctgaacctttatgttagtttatccaaagtttgggctagaagtgaggagaatccctaaactcgaggtggtgtgcccagacccacagcccgtgttcccgaagttgctaagtgcccgagcgcagcgcgttaagtagagaagtcttggtagtaagcgaacccgacccggctctcggggcgctagtgacggaaagcagcacgcatatctttgcgggaagaatctagagtcgccctgggatagatccatctccttctgccactgaatttcacacttgaaaaagataaggtcatgggggcggatgaatgatatccctcactcatttagccattcttattattatataaaaaaaaggcttgtcaattatgaaggtgtgtcccagatattacatgaagatcatgcaaactacttgaaatttgaatccggacatgatcgtaaggaaactctttcataaagcacttttgtggcctagttcccacacacacacaaaagtattaggtctttaaaacttttccaagtagtaagtgagactccctcttactgtctacgaatacacaataaagagatgagacactgccccaatcctaaagaggccagaactgaagtgctacattgtgggagttaggggatgcttcttttttccagctcttttttctagaatcctcattacagctaacgctggtaataaaggtaggaaaacaatagaactcataaaacttagaaatggtaataaatcttggctcctgtctctagcccagttccttcttacatgagattcaaagtttttcagtatgcaatgctgaacgttcacactatggttgc

SEQ ID NO: 18763 - protein, 148 aa, Homo sapiens
MGDLSRTALWLGGRRDPSGSFRVRDGAAAEVGRACLGLPSECGSLVRARASPRPLLGPAVCPWRARSPRPGLPRPSPTCPWKRGGDWCALSLVAPAASRHPPLSASEQRIPPTSTCTCTRPLGNPLAFLTTVQNQKQIEHWENKDDAS

SEQ ID NO: 18764 - DNA, 2897 bp, Homo sapiens
  CDS (60)..(1994)
tgtttcgaacactaaatagagaagaaattcctgttaatgatggaatagagctattgcagatggttctgaactttgataccaaggatcccctcatcctgtcctgcgtccttactaatgtctctgcactctttccatttgtcacctacagaccagagttcctgccccaggtcttctctaagctattttcatctgtcacttttgaaactgttgaagaaagtaaggcccccagaacccgggcagtgaggaatgtgaggaggcatgcttgttcctccatcatcaagatgtgtcgtgactacccccagcttgtgctgcccaattttgacatgctttataaccatgtgaagcaactcctctccaatgagctactcctgacacaaatggagaagtgtgccctcatggaagccctggttctcattagcaaccaatttaagaactacgagcgtcagaaggtgttcctagaggagctgatggcaccagtggccagcatctggctttctcaagacatgcacagagtgctgtcagatgttgatgctttcattgcgtatgtgggtacagatcagaagagctgtgacccaggcctggaggatccgtgtggcttaaaccgtgcacgaatgagcttttgtgtatacagcattctgggtgtggtgaaacgaacttgctggcccactgacctagaagaggccaaagctgggggatttgtggtgggttatacatccagtggaaatccaatcttccgtaacccctgcacagagcagattctgaaacttcttgacaatttgcttgcgcttataagaacccacaatacattatatgcaccagaaatgctagccaaaatggcagagcctttcaccaaggctctggatatgcttgacgcggaaaaatctgctatattgggattacctcaacctctcttggaactcaatgactctcctgtcttcaaaaccgtcttggaaagaatgcagcgtttcttctctaccctctatgaaaactgttttcatatcctagggaaggcaggcccttccatgcagcaagacttctatactgtggaggaccttgctacccagcttctcagctcagcctttgtcaacttgaacaatattcctgactaccgactcagacccatgcttcgggtctttgtaaagcctctggtgctcttctgtcccccagagcactatgaagccctggtatcccccatcctcggacctcttttcacctacctccatatgaggctttctcagaaatggcaagttatcaaccaaaggagcctgctgtgtggagaagatgaggctgcagatgaaaacccagagtcccaagagatgctggaggagcaactggtgaggatgttaacccgagaagtcatggacctaatcacggtttgctgtgtttcaaagaagggtgctgaccacagtagtgctcccccagcagatggagacgatgaagaaatgatggccacagaggtcaccccctcagctatggcagagcttacagacctgggcaaatgtctgatgaagcatgaggatgtttgtacagcgctattaattacagccttcaattccctggcctggaaagatactctgtcctgccagaggacaacctcacagctctgctggcctctcctcaaacaagtgctgtcagggacactgctcgcagatgcagttacgtggcttttcaccagtgtgctgaaaggcttacagatgcacgggcagcacgacgggtgcatggcttccctggtccatctggccttccagatatacgaggcactgcgccccaggtacctggagataagagctgtaatggagcaaatccctgaaatacagaaggactcactggaccagtttgactgcaagcttttaaacccctccctgcagaaagtggctgacaagcgccgaaaggaccaattcaaacgcctcattgctggttgcattgggaaacccttgggagagcagttccgaaaagaagttcacattaagaatcttccctttgtagccgatctctaggcccttcttgcactgccacctcactttccaccactgtcagcctggaaagagatccaggtctggagctggagagaacaggccctgtgcaggaccagaagtaattatactaaagtatcaagaaagggagttagggcttaaactattctgtctagatgtcccagatagttcccattctacttggagatttggcttttccaagaaaagctagagcagagcagcccttctcccacaagccctcccacccccgtgcagccacatacctgtacagaatggtaactaagggtgctgtgcccaaccctgcgactagcaaggctcgcagcaagagcacagccctcaactacttgtgccagagtttctcttggaccactccaactcccactgagcccttttgctgctgggctggcaggaaactttccccactccctaaggggcatgtctgggttaggtgctaagtgctgaagagaacttggtcagttctctcaactttgctttgggcaagaatctggtcacctgatgggatccatggtacaggctactgctaaacttggcacagtatcaagtatagtacctccaaggaccagggctgggcagtctttagtgctaacatcccctttagagttcacacatcttgcccttccatgaatgacccctcagtctggcctccccagcctcaaggtccactcaggcacaagagccacagtaccctagatagtgtcacatgacaccgttgtcatccaaggataatacagaccaactaggctacatctgtgatgagcagctagcaaagccgctggtcttctcctaggactaagccaggtgccttccacaatctcatggtctttcaggtccctggttacttttctcaaaggccatttccaaaagaatacatgccttcacatc

SEQ ID NO: 18765 - protein, 645 aa, Homo sapiens [sequence omitted]

SEQ ID NO: 18766 - DNA, 1697 bp, Homo sapiens
attaatcccaatataaggttataatatttttctttacattctttttttagtaagaaaaatgtagttttgaaccatcatataatactagaactaattaggagaaatttaaatcctctttgctttatataagtatagtatatatttatttagcagaataaatgtttatggttgaaaatggctgggattatagttgtgagccattgtgcctggcctattttcagtatttttgtttaaattttgtaaaaaggtaaaataaatgatttttgaaaatagctggagttgttttcatagagtctgtggttataggactatttaactatatattgagtaaaatctatgctatgtcaagttttattcagttgtccctagtagaatatatttctcttttaattctgtatacagtatgagtaactccagtttaaaacactggtattttaatgagtttaaattgtactgttatatattatgatacatatttttcttctggctgtggtttagtttttaaaatttttgatgtccattttaatttttagaaataaaagcttaaaaatatgggtggaagtagatttcagtttgatgattatcttggcgaaagtatagtacctgtgaaatggtggtaataatttgattctttattctattttgattgtagctccttttgtaaggagcatttgtaaaatttagttgctttagagttatacaaatccttttattaccatttattaactgtttgttgttttaggacctgatcccaaccttgaagaaagtcctaaaagaaaaaatattacatatgaggaattaaggaataagaacagagagtcatatgaagtatctttaacacaaaagactgacccctcagtcaggcctatgcatgaaagagtgccaaaaaaagaaggtatgatagtttagtctgaatcactttactgttgaggattggaaactaaaacattactttaaaacaatactataaaaaattaattaatatgtgatttaactcttcaagcaattaaccaaagtaaaatatttttaaaatagtactttacagttatcagttctttttttttttttgagacggagtcttgctccgtcgccaggctggagtgcagtggcacgatcttggctcactgcagcctctgcctcctggattcaagcagtcctcctgcctcagcctcccgaatagctaggactacaggcccccacgcccagctgattttttgtatttttggtggagatggggtttcatcatgttggccaggatggtctcgatcttttgaccttgtgatccgcctgcctcggtctctgagagtgctgggattacaggcttgagccaccgtgtccggccagttttccatttttaaggtgttccaaaggccattttgtgttagaaaataatgaagtcaaggccgggtgtggtgtctcatgcctgaaatcccagcactttgggagaccgaggtgggtgtatcacttgaggccaggaattggagaccagcatggccaacatggcgataccttgtctctgctgaaaatacaaaaatcagctgggcatggtggtgcatgcctgtagtcctagctactcgggaggctgaggcaggagaactgcatgaacccaggaggcagaggttgcagtgagccgacatcacgccactgcactgcagcctggatgacggagcgaggctctgttcccccctccccccgcc

SEQ ID NO: 18767 - DNA, 1591 bp, Homo sapiens
actccagcctctctcgctaccctccaatctccctgtccagtctttttcttctctagtagagacaaaggagacacattttatccgtggacccaaaactctggcgctggtcacagactcaggaagacagtcttcccttggtgtctaatcactgcggggacgcctgcctaattattcacccacattccactggtgtctgatcaccttggggatgcctgccttggtcattcacccacattcccatggtggcaagtcatttgcggggacgcctgctttggctgctcacccccgcccttctccgtgtctctacttttctctttaaacttacctccttcactttgggcaatcttccgccctccattcctccctcttcccccttagcctgtgtacttaaaaacttctcttaaactaacacctgatataaaactcaaacgtcttattttcttctgcaattactgcttggccgcaatataaacttgacaatggttccaaatggccagaaaacggcacttatgatttctccatcctacaacccatttcaattttatatggatgcaccttcttactcagccacaatcttgttccagacaccagccccctgggcaactatcttccagtcctctagcaggctagacaggaaatttgccaaactgctaatcttctcttgcctactccagattcccagccatatgaagacaccctagctggacgatcagtccttgtcaaaagtctgacccctcaaactctacagcctcaatggaccagaccctacccggtcatttatagcacaccaactgccgtccatctgcaggaccctctccattgggttcaccattccagaataaagccatgcccatcagacagccagcttgatctctcctcttcctcctggaagccacaagattaggccgagagccgatcagacaaacaacctacaacccttaagctcctggcagcgcccagccaaggccatgcttccatgcaacactccttccaaatggccatcccagcatgcttccaagcaggcttcatccgttcctctggaccctcatctcttaagacctgccgcctataaaaaggattatatcttgagaccctatcctctaaaattttttccacacccaaaacaaaaaatctctgggtcaaaagtctaaaacgcttaggctggcaaccatcagatccttgcccatggtgtcctcaagcctactctcatgaaatggacaacagtacacgcatatggggccagttccacatatttggcaaccagaccagcatccaggacaacacaaagtatgttgtttgttgttagagggcttgggacatttcactctttgccagcctcagcttaatccaggagacaaagattattttccttattatctcttctgcataggatctgcaatcagaactattgaacttctccattcagaccgccactcacacctatgggaaaagggtaatgtatcatcggcttagcaacagggaatactattcgtatgatggaaaatggggacaaaaggctttggtacataaaacattattccttccttggcctaaaaactcatcgccacctacattaaagctaatatgcctg

SEQ ID NO: 18768 - DNA, 3237 bp, Homo sapiens
caaacagaggtttccactcttgaacaagatcatccaggttcttaaagtcctccccacttccaccgcttgctgcgagaaaggccgcaatgccctccagcgagttcgcaaaaaccaccgctcccgcctgaccctggagcagcttagcgacctgttgacaatcgctgtaaacggaccgccaatcaccaactttgatgccaagcgagccctggacagctggtttgaggagaagtctgggaacagttacgcgctgtctgcagaagtcctcagtaggatgtctgcgctggagcagaagccagcactacagaccatggaccacgggacggagttttaccccgacatttagggagctggcgctgcagagttcactaagctgttgaatatttttttaatctatactcataagctttgatatattatataaatatatattatattatattatattatattatatatatatatatatataaactcacactgaaaatttttaaaaaccaaggtgacgcgtccaccagaagccactgggagatttcagaaaggaaaaatgttggaaactgactcttgtctacaaaatttggcagctgcaacatacatggcaactcattttcactcacagaagcacgtgctggggcctcctgtgttcccaccttactgtccaccaacagcataagctaaaatgacaggtctctgtcatcacctttaggtagctcattttgtttatgttttcatttgcgggtggcggggctctgggtttgggtttatgttcttgccttttcttttttcatttggttttatgatgggagggagctcctcagcctcctcattgacattctggtccggctgaatcagatctctgacttaagtcagggtgggttgtctgtctgcatttgggaggcaggggggttgacctttctccctccccacctgacttcagcttgagatctttttttattcatttcctgatgagggttccttcactgtcctacaaacaaaagtgtcggtcaaactgtgacactgccacacctcacctctgttgcctcgtccatccctgggttgtggatcccttccttccagccccccctggaaactcacgatattacccattatactgaaggcaacattgcctcaccgctgagcttgaaatcctggggaagggagaaggggtaagcttttagcattcctgtttttacgaagtggaggataaaacaatataattccattccaatccagggcttttggggagatgaagagccaagaagtccagaccccaacaggggagtgatttttggctaaaaaaacaaggaaaatgaaaagtacatattcgagttacatggattatttatactttttctttataatcatatcatgtgttgagggtattttttttcctttaataatcaagaaatgcctgctatagttcagtggcaggtagtgtcaatgcaaattgtgccctaagttatgcataactcaaatgagagtctgtagagatgtggtcctccttttgcaacaaggctgataacatgctacatggtcataggaaactggggaatgtgtctctgcctgtaaactcttccttttttgaacagggtagagatgtcctaaagaaatggagaaaagaagagaggactctcaaggcatcagcctacacagacacacacacacacacagacacacacacacacacagacacacacacacacacacaatcacaatatacaatataagctttagaaatagccacttgcctattccctggggcaagtagtggtttaaactagaggagtctgatcaatgctctttcattcatttaactaccggtatacctcgcaagggagttttaaaaaatgtgcgtgagctgttaaaaacttctgttcatgttcctacatctgatttatgcatattttatatgcagagatcctatcacgtggatgcaggtcattttgggggagggaggaagatctgaattatatacatgtggtcagttctgctgagagcttcatctcttggttggcagagggcttgtgcagccctgacgggacccagaagcccatttgctcgcagtttcctctctctgtttttttcctcctggaggtaggagagagggcctgaccaggcaccagatgatggagcaagggcagctgcatgctccctctctccagaccagccttctgcttttggggtccgaaggggcatttgctcccatcctgagcctcctctgcccctgtcttgctcttccccaccatcctacaagtacctcagtctccagcaggcccacccctccacctgcagcccagggcgggtctgttctgccaatgcccacctccttgagccacagttagctgccaactgggtcttgggacaccctccagtacctggctcaagagagaccaggccgggccgagccttcttcccactgcagtggactagacccacggccaggggatgggcatccccaggtagcaatcccacaacgctgttccccctccctcacagaggccccgtggcccctaccccactcccgccgtaacaggcaggtttagttcacaaactccttcaaaaccctcccgcaccaggactgagcagcgtcagtggcaataggaaaggtccaaactggatcaagagctggtccaggaaagataccgcccctgccctgttagatgcttctgctgcccctagaggccaagcccctgaagtgcagccgtcctggcctccctcacttgctcaaccactgtcaggaggagaggatgtgggcagcatgagcatcgccaggcagcgctgcccaccatccacaggctttctggccagggcagggggcatcagctagcaggaaacggtgggagagacatatctgcacactcataaattcaatggctactccagtccagaagcagggctttggcccagcccgctccgcgcagcagctgctgctggctgtactcaggacaacgctgctgaaccattttcatgtcaatcacaaaggaaaaataagtggggatggggggaaatacctaggagtctattatcacatacatattaatatgttaatactttctttaaaaaaaacctcttgatgttattattttgcagactacgctttatagtacctgtgtgacgggacctagaacactggatacaaatagagctatgttggtttatcataatatgtacgcagaaactttctttttgtcatattatccttgtaatgtaagaagattgttaataaaagcatttaaattt

SEQ ID NO: 18769 - DNA, 2082 bp, Homo sapiens
  CDS (953)..(1774)
ttggtctactggttattcttaaacaaggctttgtccaaggacatttggctcgcaggcacagagctgattaactcgttatgtatcttttgataataaggcagcgatcattaagaaaaacgtgtagccaatgaaataacatgttctgggccccaccactggactgggaggtgcagcgcatccaagcagaggctgcctcctgccctccacgcctgctgctctcgcaggcaggggctctgctgcttacagcagtgcggccatctcggcttctctccacatcgtctgtcacgcgctggtccccaccatacctctcgccaccccgtgcctctgtccccgtgcggcctgaggagctccagctttccctgccagcggtgctctgggagtggggacgtgatgcagggcgagcatgatgcaacggggcaccccagacccttccctcccgtggggggaggggtgtggcacgcagaggggcagagggcggggacactggccccgtgggggaagaaggtgctgtcacagccgttactgtcccccgtgggaccccagcctggagccccccatcctttggctcctgcctgtggccactcagctctcaggtggccacatgcacatcccctgctccttccctgcgcacctgccctgcccagtggcctttctggtcccagctactgaaaccggtgagctgctccagggtgaggctgctttctggctcctggtgtatttggacacagataggcccttagtgtccagaggcgccccatgcagccctcatggtcagcaggacacccaggatagaccccctccacgcagcacctgggccctgggagcggctgcttttaggatgccacctgttcctgggcgccttgtttttagcttctgacctgaagatgagcgggggagcgcggtggcgagggcacgtgggcgtggctcacggtctcctctctgtggcaggtacatgtcccagagcaagcacacggaggcccgggagctcatgtactcgggagccctgctcttcttcagccatggccagcaaaacagtgcagcagacttgtccatgctggtcctggagtccctggagaaggcggaagtggaggtggctgacgagctgctggaaaatctggctaaagtgttcagcctgatggaccccaactctcctgagcgcgtgacctttgtgtccagagccctgaagtggtccagtgggggctccgggaagctgggccacccccggctgcaccagctgctggccctcaccctgtggaaagaacaaaactattgtgagtcgaggtatcattttctgcactcagcggacggggagggctgtgccaacatgctggtggagtattccacgtcccgcggcttccgcagcgaggtggacatgttcgtggcccaggccgtgctacagtttctctgtttaaaaaacaaaagtagcgcatcggtggtcttcacgacgtacacccagaagcacccgtccatcgaggacgggcctccgtttgtggagccgctgcttaacttcatctggttcctgctgctggctgtggacggtgggaagctgacggtgttcactgtgctgtgtgagcagtaccagccatccctccggcgggaccccatgtacaacgagtacctcgaccgcataggacagctgttcttcggcgtcccgcccaagcagacgtcttcctacgggggcctgctcgggaaccttctgaccagcctcatgggctcctcagagcaggaggatggggaggagagccccagcgacggcagccccatcgagctggactgaactggccaggccacgtggagacaccacggtcgacgacggctggagggacgtttcagaggcgagtcctgggtggctcctcgccttgggggctcctggccctgaggctggcggtggccgcatgccggcgcgtgtctgtttctgtgcggcggctcagggtggcgcggctgctgctcactgtgctgctgggacccaagagtggggcgtcgcccctgctggccgccgcgtcccccgagattgacccacaataaagcacaggccttaccgcggaaaaaaaaaaaaaaaaaaaaaaaaaaaaaaaaaaaaag

SEQ ID NO: 18770 - protein, 274 aa, Homo sapiens
MSQSKHTEARELMYSGALLFFSHGQQNSAADLSMLVLESLEKAEVEVADELLENLAKVFSLMDPNSPERVTFVSRALKWSSGGSGKLGHPRLHQLLALTLWKEQNYCESRYHFLHSADGEGCANMLVEYSTSRGFRSEVDMFVAQAVLQFLCLKNKSSASVVFTTYTQKHPSIEDGPPFVEPLLNFIWFLLLAVDGGKLTVFTVLCEQYQPSLRRDPMYNEYLDRIGQLFFGVPPKQTSSYGGLLGNLLTSLMGSSEQEDGEESPSDGSPIELD

SEQ ID NO: 18771 - DNA, 1889 bp, Homo sapiens
tggtgagggaagagagagaccctctcatattgttttatactcagaaaagaaaagagaagcaaaactaaaggcaggtagcctggcacctaggaacagacccaaaaccaaggaaccagacccgaaaccaggcctgggcctgcctgacctaagcctagtagttaaaattctacccctgacctagcaactgatgttatctctagattatagaaagacattgtaaaacttcccggtctgttctatttcactctgaccaccgttgcatgcagcccctgtcacgtaccccctgcttgctcaatcgatcatgaccctctcacgcggaccccccttagagttgtgagcccttaaaagggacaggaattgctcactcggggagctcggattttaagacactagcctgctgatgctcccagctgattaaagccactcccttcactatcttggtgtctgaggggttttgtctgcggcttgtcctgctacatttcttggttccctgaccaggaagcgaggtgattaacggatggttgaggcagctccttaggcgactttagcctgccctgtggaacatccctgcgggggactccaaccagccaaagcaacgcggatcctgagagtgctcctgggtaggcacttgccctgatgggacgccttgccagagcagtgtgtggcaggcccccgtggaggatcagcacagtggctgaacaccaggaaggaactggcatttggagtctggacatctaaaacttggtaagacttgtctttggaacttgcccactccatctgagtggaagcatggcctgatcatccacggtgtgcctttatcggcactttggttttggttttgacatggtttgaattccttgacagggttggtcttgggaatttgcctctaccatttgagcggaagcatggcctgatcacccatggcgtgcctgtaccggcactttggtttttgtttttgacttgacttgggttgcttgatactttggttttggttttgacctggcttggatttctggatactctgattttggctttgattttggtttggtgtaaactgcaaaagtgtgtgtgtgccctttttacctgttctttgttttgtgcgtgtggtgtgagcgtggtgttttgtctcaaagaagcatgggtcaggaacaaataagcccaccctactaggaactatgttgaaaaatttcaagaaaggatttaagggagattacggtgttactatgacaccaggaaaacttagaactttgtgtgaaatagactggccagcattagaggtgggttggccatcagaaggaagcctagacaggtcccttgtttcaaaggtatggcacaaggtaacctgtaagccaaggcacccagaccagtttccctacatagacagttacagctggttttagacccccttccccgccacagtagttaagagaacagcagcataagcggctggcagaggcaaggaaagaccagcagagacaaagagaggaaaagacaggaagagacagagagacaaagaaggagtcaagaaaagagaaagagagacagagaaagagagaggcagaaagaggaagagacagaggcaaaaggaaagtcagagagagagagacagaaagtcaaagagagaaaaagagaaagaaatatacaagtacttaagaaaaaaacagtataccctattcctttaaaagccaaggtaaatttgaaacctataattgataattaaaggtattcttcgtaaccctgtaacactctaataccactttgttgtcagtgtagtcagtgtaaacaagggcgtatcccgaaagcactgaggccttcctatcaaaaatccttaacccagtaacccgcagatggcccagatgcattcaatctgtagtggcagctgctttgct

SEQ ID NO: 18772 - DNA, 1651 bp, Homo sapiens
  CDS (994)..(1617)
acctgatgtgtttaaaacacttgattaggctccggttttcctttggcttctgcttttcagtgaatggcatgactgcctatgtgggtggcaagccacccaggtgccgaggaaagagactgagggcacgagctgttccagtataataaaatatataaaataagaagagttatactagatctagatcatagacatgattgtatgtgagtatcattggtcattggtttgtggcaattgctctttattccaatattgtgatggtcctcgctctacgatcatggcctgggaagggccgggccgtgcagagatgggagccgaggggacgtagtgcggggtggccagaagacaggagtgtgggccttctcttgtgcctggacagggccaccggagggcttggtctggcggtgacgccagtgtctgggaggatgcctgttgcagggtggaccatggtctggcggtggcatcggtgtcggggaggaacgcccgctgcttggcgggctgggagggggggcctccctttccccgggggagtttggagaggactgctcctccgcctcttgtggagggcctgacgtcggtcgggcccgcccgcagttatccggaggcctgtctccctgtggtgctgtgcttcagtggtcgcgctcctggtccgctttcgtgttccatcctgtatacctggctctgccttttggatggcgggggcgaattagtgaaggtgctgaatgtctgatatgcggaggtgatggcatgggctgtctctctctcttctctctctctctgcctctgctgccgggcagggaggggccccctgtccggtggacacgtgacccgtgtgaccttgcctattattggagatggttcacattccttgccctgcccctttgtcttgtgtccagtgaatatcagtggtggccccgaatgtctggctgcgctgatgtttgctggatgcagagcaaggggggcggggtggggagtgtgagtcatctccggtgattgatggggtcacgcgggtcgcgtttccaccggacggggggcccctccctgtttggcggcccaggtggagagagagaggaggcggcttatgccattgtttctgcatttcggagacttttggtgcttttactgattttgctgctgctgtctggagggcggggccgggtgtacagagtggagcaggagggtgaaatgggggcgtggccgctgaagcacagcatcgcggggagccggttaggcctccggataactgcgggccagcttggctggtgtcgggccttccacaagaggtggaggagcagagtcttctctggactcccgcggggaaggggagactccctttcctggtccgctgggtggcgggtgtttttccttgacactggggctgccgctggaccatggtccacttggcggcgggcgtcttcccggatgctggcgttgccgctggaccaaggagcccttctgctggccctgtccgggcatgacaggggcctcgcactcttgtcttgtggtcacttctcactgtgtctcctcggctcctatctctgtgtggcctggtttttcctgggttgtggttgtggagcgaggattattgtagtgttgggatggagagtggttgctgcagactaatgattgatgatattaatatataatcatatct

SEQ ID NO: 18773 - protein, 208 aa, Homo sapiens
MGSRGSRFHRTGGPSLFGGPGGEREEAAYAIVSAFRRLLVLLLILLLLSGGRGRVYRVEQEGEMGAWPLKHSIAGSRLGLRITAGQLGWCRAFHKRWRSRVFSGLPRGRGDSLSWSAGWRVFFLDTGAAAGPWSTWRRASSRMLALPLDQGALLLALSGHDRGLALLSCGHFSLCLLGSYLCVAWFFLGCGCGARIIVVLGWRVVAAD

SEQ ID NO: 18774 - DNA, 2718 bp, Homo sapiens
  CDS (33)..(2627)
ttgaggtcacaccttcagtccttcgagcaaatatgcctcttcatgttcgacgcagtagtgacccagctctaattggcctctccacttctgtcagtgatagtaatttttcctctgaagagccttcaaggaaaaatcccacacgctggtcaacaacagctggcttcctcaagcagaacactgctgggagtcctaaagcctgcgacaggaagaaagatgaaaactacagaagcctcccgcgggatactagtaactggtctaaccaatttcagagagacaatgctcgctcgtctctgagtgccagtcacccaatggtgggcaagtggcaggagaaacaagaacaggatgaggatgggacagaagaggataacagtcgtgttgaacctgttggacatgctgacacgggtttggagcatatacccaacttttctctggatgatatggtaaagctcgtagaagtccccaacgatggagggcctctgggaatccatgtagtgcctttcagtgctcgaggcggcagaaccctggggttattagtaaaacgattggagaaaggtggtaaagctgaacatgaaaatctttttcgtgagaatgattgcattgtcaggattaatgatggcgaccttcgaaatagaagatttgaacaagcacaacatatgtttcgccaagccatgcgtacacccatcatttggttccatgtggttcctgcagcaaataaagagcagtatgaacaactatcccaaagtgagaagaacaattactattcaagccgttttagccctgacagccagtatattgacaacaggagtgtgaacagtgcagggcttcacacggtgcagagagcaccccgactgaaccacccgcctgagcagatagactctcactcaagactacctcatagcgcacacccctcgggaaaaccaccatccgctccagcctcggcacctcagaatgtatttagtacgactgtaagcagtggttataacaccaaaaaaataggcaagaggcttaatatccagcttaagaaaggtacagaaggtttgggattcagcatcacttccagagatgtaacaataggtggctcagctccaatctatgtgaaaaacattctcccccggggggcggccattcaggatggccgacttaaggcaggagacagacttatagaggtaaatggagtagatttagtgggcaaatcccaagaggaagttgtttcgctgttgagaagcaccaagatggaaggaactgtgagccttctggtctttcgccaggaagacgccttccacccaagggaactgaatgcagagccaagccagatgcagattccaaaagaaacgaaagcagaagatgaggatattgttcttacacctgatggcaccagggaatttctgacatttgaagtcccacttagtgattcaggatctgcaggccttggtgtcagtgtcaaaggtaaccggtcaaaagagaaccacgcagatttgggaatctttgtcaagtccattattaatggaggagcagcatctaaagatggaaggcttcgggtgaatgatcaactgatagcagtaaatggagaatccctgttgggcaagacaaaccaagatgccatggaaaccctaagaaggtctatgtctactgaaggcaataaacgaggaatgatccagcttattgttgcaaggagaataagcaagtgcaatgagctgaagtcacctgggagcccccctggacctgagctgcccattgaaacagcgttggatgatagagaacgaagaatttcccattccctctacagtgggattgaggggcttgatgaatcgcccagcagaaatgctgccctcagtaggataatgggtaaataccagctgtcccctacagtgaatatgccccaagatgacactgtcattatagaagatgacaggttgccagtgcttcctccacatctctctgaccagtcctcttccagctcccatgatgatgtggggtttgtgacggcagatgctggtacttgggccaaggctgcaatcagtgattcagccgactgctctttgagtccagatgttgatccagttcttgcttttcaacgagaaggatttggacgtcagactgacgagactaaactcaatacagtggatgaccagaaagcaggttctcccagcagagatgtgggtccttccctgggtctgaagaagtcaagctcattggagagtctgcagaccgcagttgccgaggtgactttgaatggggatattcctttccatcgtccacggccgcggataatcagaggcaggggatgcaatgagagcttcagagctgccatcgacaaatcttatgataaacccgcggtagatgatgatgatgaaggcatggagaccttggaagaagacacagaagaaagttcaagatcagggagagagtctgtatccacagccagtgatcagccttcccactctctggagagacaaatgaatggaaaccaagagaaaggtgataagactgatagaaaaaaggataaaactggaaaagaaaagaagaaagatagagataaggagaaggataaaatgaaagccaagaagggaatgctgaagggcttgggagacatgttcagccttgccaaactgaagcccgagaagagatgaacaacaaagcgattcaaaacatgtcttgaacagcacatattgcacagttgttgttttttttaaacaaacaataaatttacttttaatg

SEQ ID NO: 18775 - protein, 865 aa, Homo sapiens [sequence omitted]

SEQ ID NO: 18776 - DNA, 2566 bp, Homo sapiens
  CDS (44)..(343)
tgttgagcttcctctgaggtgctgcacaaggagtgggtgtgggatgcactgttgcgtgctcgtcgtctctgagggcgcccgggtgggtttccgctgtctgaagagttgggcctatttttgtgcacgtgtttggcgggcttgtgttgtttctcttgggaacgtgcccggggggaaggctgcatcccaggagttcaagatggcggtgagctatgattgcaccactgcactccagcctgggcaacagagcaaacccatctctaaaagaaagaaagaaattttaaaaaggaggaaaggaaagaaaggagaaaagaggaaaggaaaaaggaaaggaaactgttcccattaaacactaactccccattcctccctgccccccagcccctggcaaccaccgttgtcttttctgtctctatgaattcgacaaccctgggaacctcatgagtagaatcatacagtatttgtcctgttgtgatgagctgctttcacttagcatagtgttttcaaggttcattcctgttgtagcatgcgtccaaaatttcttttcaggactgtagaatattccacggtctgtatagaccaccttttgtttatccattcatctgtggtgaacaatgctgctgcagacatggtggctgtggtgaacggtgccgagacatggtggctgtggtggacggtgctgccgagacatggtggctgtggtggacggtgctgctgagacatggtggctgtggtggatggtgctgagacatggtggctgtggtgaacggtgctgccaagacatggtggctgtggtgaacaatgctgctgcagacatggtggctgtggtgaacggtgctgctgagacatggtggctgtggtgaacggtgctgagacatggtggctgtggtggacggtgctgctgagacatggtggctgtggtgaacagtgctgagacatggggctgtggtgaatggtgctgccgagacatggtggctgtggtgaatggtgctgctaatgtgtttagaattggtggattcttggtctcactgacttcaagaatgaagccgcagaccctcgcagtgagtgttacagttcttaaagatggtgtgtccggagtttgttccttctgatgttcagatgtgtttggagtttcttccttctggtgggttcgtggtctcgctggcttcaggagtgaagctgcagacctttgcagtgagtgttacagctcataaaggcagtgcagacccaaagagtgagcagcagcaagatttattgcaaagagcgaaagaacaaagcttccatagtgtggaaggggacccgagtgggttgctgctgctggctccggcagcctgcttttattcccttatctgaccccacccacatcctgctgattggcccattttacagacagctgattggtccattttatagagagctgattggtctgttttgacagggtgctgattagtgcgtttacgatccctgagctagacacagaatgatatttacagtcatctagctagacgtaaaagttctccaagtccccactagattaactagacacagagcagcgattggtgcatttacaaaccttgagctagacacaaggtgctgattggtgcgtttacaaaccttgagctagacacagagtgctgattggtgtatttacaatcctgtagctagacataaaggttctccaagtccccaccggattagctagatacagagagtgctgattggtggacggtgctgctgagacatggtggctgtggtggacggtgctgctgagacatggtggctgtggtggacggtgccgagacatggtggctgtggtggacggtgccgagacatggtggctgtggtgaatggtgccgagacatggtggctgtggtgaacggtgctgccgagacatggtggctgtggtggacggtgctgctgagacatggtggctgtggtgaacggtgccgagacatggtggctgtggtggacggtgctgctgagacatggtggctgtggtgaacggtgccgagacatggtggctgtggtgaacggtgccaagacatggtggctgtggtggacggtgctgctgagacatggtggctgtggtgaacggtgccgagacatggtggctgtggtggacggtgctgctgagacatggtggctgtggtggatggtgcggagacatggtggctgtggccccactcggatccgctggacccccatgcctggctgatccctgcccacgtggggcaggcccacatctaacccccacaagtcactgcctcactgcacctgccaaggctgccctggcgctgagtcctggggtccctcccggagttcctgggagaaaggcgccgtcgtggccgcctcccgcacgccaggcccaggctccaccgtgggtctcagacgccctgcggcaccggcaccgtctgctttagcatgggacccccatctgaggggtggcctggccttcggggtccccacgctcctttgcgaagtccactgtgggtgccatcatggtctccgggacctgggccagcgggaacgggggggcactgggtgtgctgatataaagtcggcattactc

SEQ ID NO: 18777 - protein, 100 aa, Homo sapiens [sequence omitted]

SEQ ID NO: 18778 - DNA, 2436 bp, Homo sapiens
  CDS (662)..(988)
tttaagttctcttgcacacccagttcccaggcatggctctccaatctcagctccctcctttctctccggattttaggtggttatgatggatgaccaacctctgacctttgactttcgtactgaggtctcagcctttgcagcttctccctccaaagcagcttttcttctgattcctgatctcagttcagtgctcaaaatagcctctccttattttctcctggtgtcagtgttaggcctgaataacatctcatgctgttcgttaaacagatgtctgctgccaaaaagttgttctgatagaaaatccaaaatcatcgaccccaaaagccaagtctgtcattgggctaaagtgccattcctactaatcctttgcctcacctgattcatttggaataaagggccaggagcttgagtcacccccatgccaggacctctgttgctatttgctggctgctggagaggtggggtcttgcgggccctggagaggtggggtcttgtggggcagagctggagcagatgctgcatccagcagtaagcatgagaatgagcactcacagttttgggtcctgtgctggacactgtgcaagtcctgtgcatatatcacctgttgcatttcccacagtgacccaatgaagtagatactgttatctttaccattttatagatgagcaacctgaggcttcaccagaattgcacagtgagaatgtggcgtggcctggattctcacgtcgggagtcggattgcaaagccttactgggcctcgccgcgccccatggctgtcagcgcattccatgctgacctggccgtgtatgcgtgcgtgtgcacgcatgtgtgtgcgtacgtgcacgtgtgtacatgtgtgtgtgcttgtgtgcacaccacatgtgccgtgtccataggtctgtcatcatatcaggtaggactaggtcggctcatagcttggaagggctttggagacagccactctcctaacagatgggagaagttgttttgattcttactaaggtcccagaatcctattgatggctttgctgagtattgaaaggctggccttaaattaggtttgaaactgaatttggtaataggacaggatgtgttaaggaagggaaacatacagggagctgcctgctctggcagctgttgaaagtgagcaggccacggtgcctgcagtgggagtggggcagcaggcgtgtcaccttgggccagagcacatgtcttgtacacggttgcaccaatgcgtgaggatgtaggtccccaagagccaagagaaggggagctttgttgaatacgtgatattggagaaagctttggcccaaaagaacaaatttagattcgttctctctgcaatacaaatgtattccagtgggtcaaaatgttaattattattaatttctttttttgtttcttgagtcagggtctcgctctgtctcccaggctggagtgcagtggcgccatctaggcttactgcagccttgacctcccgggttcgggtgattctcttgcctcaccctcccgagtagctgggattacaggcacacacctccgtgcccagctaatttttgtacttttagtggagatgggatttcactctgttggccaggatggtcttgatctcctgacctcgtgatccgcccacctcggcctcccaaagtgttgggattacaagcataagccaccatgcccagcagagaattcaaaattcttaacaggatacttataaataaactgtgtaagaaagaagtataaatagtctaaaccagaagaaaaacatttaacttttttttttttcttctgagatggagtttcactcctgttgcccaggctggagtgcagtgacatgatctcagctcactgcaacctccacctccctggttcaagcgattctcctgcctcagcctcccaagtagctgggattacaggcgcccgccaccacacccggctaatttttgtatgtttagaagagatggggtttcaccacattggccaggctggtcttgaacccctgaccttcaggtgattcgcctgccttggcctcccaaagtgctgggattacaggcatgagccatcgtgcccggcaacatttaaacttgactttccatttaataccggtttttttaggtggggcatgatggctctgcaatcccagcactttgggaggctgagaggggtggatcacttgaagccaggagtttgagagcagcctggccaacgtagcgaaaccttatctctactaaaaatataaaaatgagccaggtgtggtggcatatgcctgtgatccccatgacttgggaggctgaggcacaggaattgcttgaacccaggaggcggaggttgcaatgagccgagagcgcgccattgcactccagtctgggtgacaggagtgagaccctcaaaaagaaacccgtttttgtgatgtgttgtcattcttcctgagaattc

SEQ ID NO: 18779 - protein, 109 aa, Homo sapiens [sequence omitted]

SEQ ID NO: 18780 - DNA, 1795 bp, Homo sapiens
  CDS (35)..(940)
actgcgcgccccgcccggagtccccgccgccgtcatgcagtccccggcggtgctcgtcacctccaggcgacttcagaatgcccacactggcctcgacctgactgtgccccagcaccaggaggtacggggcaagatgatgtctggacacgtggagtaccagatcctggtggtgacccgtctggctgcgttcaagtcggccaagcacaggcccgaggatgtcgtccagttcttggtctccaaaaagtacagcgagattgaggagttttaccagaaactgagcagtcgttatgcagcagccagcctccccccactacccaggaaggtcctgtttgttggggagtctgacatccgggagaggagagccgtgttcaatgagatcctgcgctgtgtctccaaggatgccgagttggcaggcagcccagagctgctagagttcttaggtaccagatccccaggggctgcagggctcaccagcagagattcctctgtcctggatggcacagacagtcagacagggaatgatgaagaggctttcgacttttttgaggagcaagaccaagtggcagaagagggtccgcccgtccagagcctgaagggcgaggatgctgaggaatccttggaggaggaggaagcgctggaccctctgggcattatgcgctccaagaagcccaagaaacatcggtgtgaagggaagggactgggccctgcagggtcagaacctccccacccccaggggaggccaggcagaagcctgggtcacagcacccagaactgcatggttccattttctccggggctgtggggccaaagtagaagcctgcgggctgcgggagcggctctcaccctaggagccagagcccaatgtgtcttattccccgtggacatgaaggggagggagggtgtggggatgccttgccaaccagaagcccagccccaaggatgaagcaagacatgtggggccgtagcgaggtgtcacatggggcagggaagcttcatgcccacgggttctgccagccccagcacagacccaaactggggctgggcctctatccctcctctgcctctgttcgcatagtaagaaggagtgaccggtatcctccccttcccctaccctaagctgtagcctgggtgactgactggcctgggcctggggtggggacgtccccaagccaaattactccagggcctctgctcctcgtggctgccaggggcctgcagggtctgggtgggtctcccaggagaggaatactgagtgggagatcggctgtctggagtgttctgatgcaagtctctctctcctgagcctcctcttgatgcaagctctaaagggagaagtcaggccctgcctctccagggtatagacggccctgctaggccccagttcttcctccttccccctttcccaggaaaggccagcccagtccatggccttcttgggcctctgggcacagagccaatgttcgtcattgcagctctcagcaaactgggtcatagctttccccacagctcagcctggggcctgggcagggctcccagcctgcaccgcctcccactgccagtggggcatgattctctcaggcttctgccccgaggccttcgtcgtcctcagggtctggacttggtcagtggcctttcaccagtggagctgccttcccagggagaaggagccgtgcgccagggcagggcccgtgccttagacttctcctgacccccagagcgctggtacacaggtctaggcaccacgcagtgctttggaaattctcagtgaatgatgtttaataaagcaaaaaatgtc

SEQ ID NO: 18781 - protein, 302 aa, Homo sapiens
MQSPAVLVTSRRLQNAHTGLDLTVPQHQEVRGKMMSGHVEYQILVVTRLAAFKSAKHRPEDVVQFLVSKKYSEIEEFYQKLSSRYAAASLPPLPRKVLFVGESDIRERRAVFNEILRCVSKDAELAGSPELLEFLGTRSPGAAGLTSRDSSVLDGTDSQTGNDEEAFDFFEEQDQVAEEGPPVQSLKGEDAEESLEEEEALDPLGIMRSKKPKKHRCEGKGLGPAGSEPPHPQGRPGRSLGHSTQNCMVPFSPGLWGQSRSLRAAGAALTLGARAQCVLFPVDMKGREGVGMPCQPEAQPQG

SEQ ID NO: 18782 - DNA, 1884 bp, Homo sapiens
  CDS (225)..(1133)
agatcgctccgcccccatccgcaggttctaactttggcctgggactctgcccctctacctcagcacagaatcgccccgggtcctactacagaatcaatccttgaacactgcctccacgtcgccggctcaatctgggcgagaacccagacttccaccgcagccccgcaatctgcagacctcagcggcagcgcaggtggcagacctgcctcctttgcctgtgagtcatggcagctcccatgaatggccaagtgtgtgtggtgactggtgcctccaggggtattggccgtggcattgccttgcagctctgcaaagcaggcgccacagtttacatcactggccgccatctggacacccttcgcgttgttgctcaggaggcacaatccctcgggggccaatgtgtgcctgtggtgtgcgattcaaacccggaggtgtccaatcccaaaaagccaggacgagttaccaaccagctgcaatacctacacaaggtagtgatgaaggctctgtggaaacatcagttcgcatggccattccggcagcctgtggatgctgtcaaactgggtctaccggattatcacaaaattataaaacagcctatggacatgggtactattaagaggagacttgaaaacaattattattgggctgcttcagagtgtatgcaagattttaataccatgttcaccaactgttacatttacaacaagcccactgatgatattgtcctaatggcacaaacgccggaaaagatattcctacagaaggttgcatcaatgccacaagaagaacaagagctggtagtgaccatccctaagaacagccacaagaagggggccaagttggcagcgctccagggcagtgttaccagtgcccatcaggtgcctgccgtctcttctgtgtcacacacagccctgtatactcctccacctgagatacctaccactgtcctcaacattccccacccatcagtcatttcctctccacttctcaagtccttgcactctgctggacccccgctccttgctgttactgcagctcctccagcccagccccttgccaagaaaaaaaggcgtaaagcggaaagcagatactaccacccctacacctacagccatcttggctcctggttctccagctagccctcctgggagtcttgagcctaaggcagcacggcttccccctatgcgtagagagagtggtcgccccatcaagcccccacgcaaagacttgcctgactctcagcaacaacaccagagctctaagaaaggaaagctttcagaacagttaaaacattgcaatggcattttgaaggagttactctctaagaagcatgctgcctatgcttggcctttctataaaccagtggatgcttctgcacttggcctgcatgactaccatgacatcattaagcaccccatggacctcagcactgtcaagcggaagatggagaaccgtgattaccgggatgcacaggagtttgctgctgatgtacggcttatgttctccaactgctataagtacaatcccccagatcacgatgttgtggcaatggcacgaaagctacaggatgtatttgagttccgttatgccaagatgccagatgaaccactagaaccagggcctttaccagtctctactgccatgccccctggcttggccaaatcgtcttcagagtcctccagtgaggaaagtagcagtgagagctcctctgaggaagaggaggaggaagatgaggaggacgaggaggaagaagagagtgaaagctcagactcagaggaagaaagggctcatcgcttagcagaactacaggaacagcttcgggcagtacatgaacaactggctgctctgtcccagggtccaatatccaagcccaagaggaaaagagag

SEQ ID NO: 18783 - protein, 303 aa, Homo sapiens
MAAPMNGQVCVVTGASRGIGRGIALQLCKAGATVYITGRHLDTLRVVAQEAQSLGGQCVPVVCDSNPEVSNPKKPGRVTNQLQYLHKVVMKALWKHQFAWPFRQPVDAVKLGLPDYHKIIKQPMDMGTIKRRLENNYYWAASECMQDFNTMFTNCYIYNKPTDDIVLMAQTPEKIFLQKVASMPQEEQELVVTIPKNSHKKGAKLAALQGSVTSAHQVPAVSSVSHTALYTPPPEIPTTVLNIPHPSVISSPLLKSLHSAGPPLLAVTAAPPAQPLAKKKRRKAESRYYHPYTYSHLGSWFSS

SEQ ID NO: 18784 - DNA, 1908 bp, Homo sapiens
  CDS (278)..(640)
gagcgccttcccgttcccggtgaccgtgtcgctgtgccacatcctggctctgtgcgctgggctcccgccgctgctgcgcgcctggcgcgtgccccccgcgccgcccgtctcgggccccggacccagtccgcatccgtcgtccggcccgctgctgccgccgcgcttctacccgcgctacgtgctaccgctcgccttcggcaagtacttcgcgtccgtgtcagcgcacgtcagcatctggaaggtgcccgtgtcctatgcacacaccgtcaaggccaccatgcccatctgggtggtcctcctgtcccggatcattatgaaggagaagcagagcaccaaggtatacttgtcactcatccccatcatcagcggtgtcctgctggccaccgtcaccgagttgtcttttgacatgtggggactcgtcagcgccctcgccgccacgctgtgcttctcgcttcagaacattttctccaaaaaggtcttgcgagattcacggatccaccatctccggctgctcaacatcctgggctgccacgccgtcttctttatgatccccacctgggttctggtggacctctcggctttcctggtcagcagcgacttggtgagttgtacagcaccaagaacacgccattttcttggctagttccagaataggtgctttgttgaggagctgtagctgcatgttaacattgtggtatcttttgggcacctgacagccagcgctttcagcagtcagtcctctgtaatgcctcacggtgacgatgcacgccatcgaggaagtgggtttcctgtgtatttccttctctggtgtgcttgatcccaggtgctgatagctgctgtgtgtgcgccagtagcgtcaaggaagagaaggtgactctttcacctcctgacagtatagtccagatagcacattgactttttatttttactcattttttattttaaatgtttattttttagagacagaacctcgctctgttgccagggctggagtgcagtggcacaatcatggctcactgcggccttgacctcaatccggggctcaagcgatcctcccacagcctcccgagtaactgggactgcaggcgaataccaccatgcctggctaatttttttttgtttgatttttgtttttttactgtttttggagagacagggtctcgctatgttgcccaggctggtcctgaactcctggcgttaagagatctgccttggcctcccaaagtgctgggattacagatgtgagccactgtgccttgccagccctggaactttgaaaactatgcactggccaaaaaaaaaaaaaaaaaaaaaaaaaaagccgggcgcagtggctcacgcctgtaatcccagcactctgggaggccaaggcgggcggatcacgaggtcaggagtttgagaccagcctggccaatatggtgacaccctgtttctcccaaaaatacaaaaattagccaggcatggtggctcgcgcctgtagtcccagctacttgggaggctgaggcagaagaattgcttgaacccaggatgtggcggttgcagtgagccgagatggtgccactgcactccagcctgggtgacagagggagactccgtgtcaaaaaaaaaaagaaaaaaacgtgcgctgcctgggtgtggtggcttacgcctataatcccagcactttgggaggccaaggtgtgtgaatcattcgaggtcaggagttcgagaccagcctgaccaatatggtgaaatcctgtctctactaaaaatacaaaattagccaggcgtggtggtgcacgcctgtaatcccagccacttgggaggctgaggtgggagaatcgcttgaacccagaaggcagagtttgcagtgagccgagatcgcaccactgcactccagcctgggcaacaagtgtgaagctccgtctc

SEQ ID NO: 18785 - protein, 121 aa, Homo sapiens
MPIWVVLLSRIIMKEKQSTKVYLSLIPIISGVLLATVTELSFDMWGLVSALAATLCFSLQNIFSKKVLRDSRIHHLRLLNILGCHAVFFMIPTWVLVDLSAFLVSSDLVSCTAPRTRHFLG

SEQ ID NO: 18786 - DNA, 2527 bp, Homo sapiens
  CDS (29)..(1234)
taaaattgacctggaatcaaccattgacatgtcctgtgctaaatatgaattcactgatgccctgctgtgccatgatgatgagctggaagggcgccggattgccttcatcctgtacctggttcctccctgggacaggagcatgggtggtaccctggacctgtacagcattgatgaacactttcagccgaagcagattgtcaagtctcttatcccttcgtggaacaaactggttttctttgaagtatctcctgtgtcctttcaccaggtgtctgaagtgctgtctgaagaaaagtcacgtttgtctataagtggctggtttcatggtccatcattgactcggcctcccaactactttgaaccccccatacctcggagccctcacatcccacaagatcatgagattttgtatgattggatcaaccctacttatctggacatggattaccaagttcaaattcaagaagagtttgaagaaagttctgaaattctcctgaaggagtttcttaagcctgagaaattcacgaaagtctgtgaggccttggagcatggacatgtggaatggagcagccgaggtccccctaacaaaaggttttatgagaaagctgaggagagtaagcttcctgagatattgaaggggtgcatgaagttatttcgctctgaggcactattcttgctgctctccaacttcacaggcctgaagcttcatttcttggccccttcggaagaagatgagatgaatgataaaaaagaggcagaaaccactgatatcactgaagaagggactagccatagtcctcctgagccagagaataatcagatggccatcagcaacaacagccaacagagcaatgagcagacagacccagagccagaggaaaatgaaacaaagaaagaatcaagtgttcccatgtgccaaggggaactgaggcattggaagaccggtcactacactttaattcatgaccatagcaaggctgaatttgccctagacttaattctgtactgtggctgtgaaggctgggagccagaatatggcggttttacttcttacattgccaaaggtgaagatgaagagctgctaacagtgaatccagaaagcaattctttggcattggtctacagagacagagagactctgaaatttgtcaagcatattaaccaccgaagcctggaacaaaagaaaaccttcccaaacagaacaggtttctgggacttttcattcatctattatgaatgacagcactgggcaaagctgaacaaaaatgtgacccttcgtaattactgggaagtctgaaagagctaagcatggagtcaaggagaactacatggtagcttgcctgacagtgttcttaaaactggttgtcttttactaggactcataatgattgtcctcaaccgagaccttgagcttgcagctacgtacttatctcttgattaaaaaaaaaaaagttggcttttttttttttaacatttagtcctttttccatattggcttcttcagtgaatttttaagttcaatttgtttttattgaggtaaaatatttataacataaaactgaccagcttacccatttttaaatatgcaattcagtggattaagtacattctcattgttgtccagccatcaccatcatccatctccagaagttttccatcttcccaaattctgtgcccattgaacaataactccccacctccccttcccctagcaacagccatactttttgtctctatcatcaacttcactactcatatttctcatgtaagtggaatcatacagtatttgtccttttgtgactggtttcacttagcataaagtctttaagatgcatccatgtttccagtgtttcggtttttttagaaaaactcatacgtgattgcagccgggcatggtggctcacgcctgtaatcccagcacttgggaggccaaggcaggcggatcacctgaggtcaggagttaaagaccagcctgacaaacatggagaaaccccatctctactaaaaatacaaaattagctgggcgtggtggcacatgcctgtaatcccagctactcaggaggctggggcaggagaattggttgaacccaggaggcggaggttgcagtgagccgagattgtgccactgcactccagcctgggcaacaagggtgaaactctgtctcaaaaaaaaaaaagaagaaaaaaacataagtgattgcagaattttgttcttctcataatttctggtttagaaaattatggagccttacatcctgatcatgctgggccttagaattctgacacagtgagtcatcacatttcctcccactgcctgtggccttgttccaccatgactctcacagtacagtgtaggcttagtgtagtagtattcccttggaaagggtctggcctaccatcacatgccccaagaaacttctggttggtaaagaagataggctgcttattgccatgtgtagtcacttccaagtgcccactgcctttccatcctgcaattgtggcctgtgtataattaaatgattttagcctc

SEQ ID NO: 18787 - protein, 402 aa, Homo sapiens
MSCAKYEFTDALLCHDDELEGRRIAFILYLVPPWDRSMGGTLDLYSIDEHFQPKQIVKSLIPSWNKLVFFEVSPVSFHQVSEVLSEEKSRLSISGWFHGPSLTRPPNYFEPPIPRSPHIPQDHEILYDWINPTYLDMDYQVQIQEEFEESSEILLKEFLKPEKFTKVCEALEHGHVEWSSRGPPNKRFYEKAEESKLPEILKGCMKLFRSEALFLLLSNFTGLKLHFLAPSEEDEMNDKKEAETTDITEEGTSHSPPEPENNQMAISNNSQQSNEQTDPEPEENETKKESSVPMCQGELRHWKTGHYTLIHDHSKAEFALDLILYCGCEGWEPEYGGFTSYIAKGEDEELLTVNPESNSLALVYRDRETLKFVKHINHRSLEQKKTFPNRTGFWDFSFIYYE

SEQ ID NO: 18788 - DNA, 2098 bp, Homo sapiens
taaaaaatgtcatcacttgccaagcctggtggctcatgcctgtaatcccagcactttgtgaggctgaggcaggaggattacttgagtccaaaagattgaagctgcagtgagctgtgattgggccactgccctctagcctgggcaacagagcaagaccctattcaacaataacaaaaaaaggaattaggtgatgggaaatgcctaccatttgaatctataaagataagcaaggcagggtgcagtggctcacgcctataatgccaacattttgggaggctgagacaggaggatcgcttgagctccagagttcaagaccagcctgggcaacatagtgagatctagtctctacaaaaataaacaaatttagctgggtgtggtggtgcgtgcctgtagtctcagctacatgggaggctgaggtgggaggattgagtgagctcaggaggttgagactgcaatgagccatgattacgccactgcactgcggcctaggtgacagcaaaacctgtctcaaaaaagagagagagagagataagcaagagttactcatgatgcttggacttgggggaagatgccaactctggcacatgtcagttactacataaaaagtcaagtgcaatgtcaaatccagagcatcaagaggaaaaaaagttcagttcccaagagaacatggatagcttaataatgtaaaacttggccgggcagggtggctcacgcctgtaatcccagctactagggaggctggggccaggctggtcttgcacacctgacctcaggcgatctgcctgcctccacctcccaaagtgctgggattgcaggcttgagccaccgtgcccagccctatgaattatttcaaatgcgttagatccacctaatcaaaattctgtcattcaacatataattttgagtgccaactatgtctcaaggtcagtgttcagccctacagtaaacaacatgaacagagctgctgccttcacagaacctccatctaaggagcaggtgaatataccaccaggccgtaattggttgcttagctccaaaatagcgaatttagggtcaattaagataataatctactaactgtaatgacatctctagagtattgtgtcttttaaagtacagttatagcctgggcaacgtggggaaaccccgtctctacaaaaaaaaaaattttttttctttgagacagtcttattttttcacccaggctggagtgcagtggggcgatctcagctcactgcaacctcaaactcccgggttcaagcaattctcatgtctcagcctcctgagtagctgggattacaggcgtacaccaccacgcatggctaatttttgcaattttagtaaagacgggattttgccatgttggccaggctggtctcgaactcctggcctcaagtgatctgcctgccttggcctcccatagtgctgggattacaggtgtgagccaccgcacctgacccctcctgtctctcttaacacacattgcctccttatagaggttcaggcaccatgctgagcctgggaggtaatacaaaaatgaatgagtggaccttgtgggttccatgctagttaaagacaccctatgagaccagcctggccaacatggtgaaaccttgtgtctactaaaaatacagaaaatagccgggcatggtggtgtgtgcctgtaattccagctactggggatgctgaggcaggagaatcgcttgaacccaggaggtggaggttgcagtgagctgagatcacaccactgcactccagcttgggcgatagagtgagactccatctcagaaaaaaaagacaccccgggccaggcaaggtgggtcacacctgtaatcccagcactttggggaacaaggtgggagaatcacttgagtccggcagtttgagaccagcctggccaacataatgagaccgcatcttcacaaaaaatatgttttaaaaagctgggcatggtgaagtgtgcctgtggtcccagctacttgggaggctgaagtgggagtattgcctgagcccaggagttcgaggctgcaggctgcagtgaactgtgatcacaccactgcactccagtgtgggtgacagagggagaccctgactcatt

SEQ ID NO: 18789 - DNA, 1978 bp, Homo sapiens
  CDS (259)..(1356)
tccttgcacaccatggcagcctctccttgcaccttctcctgcctctccacactccaggttccctcaggcttgtgtccccactgctgcatcgtggcggggtgtcacagaccctctgcagcccctggctgccctggactgtgcagagatgcctgactccagggaaacctgaaagcaagaagttaatggactgtggccttctgtgacgcgcagtcgacgcaggaaatccacgagaaggttctaaacgaagccgtgggcgccatgatgtaccacaccatcaccctcaccagggaggacctggagaagttcaaggccctgagagtgatcgtgcggataggcagtggctatgacaacgtggacatcaaggctgccggcgagctcggaattgccgtgtgcaacatcccgtctgcagccgtggaagagacagcggactctaccatctgccacatcctcaacctgtaccggaggaacacgtggctgtaccaggcactgcgggaaggcacgcgggttcagagcgtggagcagatccgcgaggtggcctcgggagcggcccgcatccgtggggagacgctgggcctcattggctttggtcgcacggggcaggcggttgcagttcgagccaaggcctttggattcagcgtcatattttatgacccctacttgcaggatgggatcgagcggtccctgggcgtgcagagggtctacaccctgcaggatttgctgtatcagagcgactgcgtctccttgcactgcaatctcaacgaacataaccaccacctcatcaatgactttaccataaagcagatgaggcagggagcattccttgtgaacgcagcccgtggcggcctggtggacgagaaagccttagcacaagccctcaaggagggcaggatacgaggggcagccctcgacgtgcatgagtcagagcccttcagctttgctcagggtccgttgaaagatgccccgaatctcatctgcactcctcacactgcctggtacagtgagcaggcgtcactggagatgagggaggcagctgccaccgagatccgccgagccatcacaggtcgcatcccagaaagcttaagaaattgtgtgaacaaggaattctttgtcacatcagcgccttggtcagtaatagaccagcaagcaattcatcctgagctcaatggtgccacatacagatatccgccaggcatcgtgggtgtggctccaggaggacttcctgcagccatggaagggatcatccctggaggcatcccagtgactcacaacctcccgacagtggcacatccttcccaagcgccctctcccaaccagcccacaaaacacggggacaatcgagagcaccccaacgagcaatagcagagaatgccagaaggtaatcactcagatacacttgggaccaagagacagtgaaaaatagatgaactaagagaaaaagaatcggatggtctttgtaactgattctggacatatgcatcattgatgttgcagtgttgaaactacaagagctagaaaactgaagatgtcgtctgcttacggaagcgctgaaagactaggatgtgatttattaacgaccaacttctgttattgtgtgttaagtttttcatctgtgcatcaaatcacaaaaagaataaatagagctttttcctttatcagtcccttgggcacagcaggtcctgaacaccctgctctacaatgttgcatcaagagttcaaacaacaaaataaaaaatattaagaggaaatccccatcctgtgacttgagtcccttaagtctacaggggctggtgacctctttttgctaataggaaaatcgcattactacaaaatggggagaaaactgtttgcctgtggtagacacctgcacgcataggattgaagacagtacaggctgctgtacagagaagcgcctctcacatctgaactgcatactgagcgggcaagtcggttgtaagttcagtaaaaccctctgatgatgc

SEQ ID NO: 18790 - protein, 366 aa, Homo sapiens
MMYHTITLTREDLEKFKALRVIVRIGSGYDNVDIKAAGELGIAVCNIPSAAVEETADSTICHILNLYRRNTWLYQALREGTRVQSVEQIREVASGAARIRGETLGLIGFGRTGQAVAVRAKAFGFSVIFYDPYLQDGIERSLGVQRVYTLQDLLYQSDCVSLHCNLNEHNHHLINDFTIKQMRQGAFLVNAARGGLVDEKALAQALKEGRIRGAALDVHESEPFSFAQGPLKDAPNLICTPHTAWYSEQASLEMREAAATEIRRAITGRIPESLRNCVNKEFFVTSAPWSVIDQQAIHPELNGATYRYPPGIVGVAPGGLPAAMEGIIPGGIPVTHNLPTVAHPSQAPSPNQPTKHGDNREHPNEQ

SEQ ID NO: 18791 - DNA, 2019 bp, Homo sapiens
aaaaaaaaaaaaaaaaaaccctgctctattgcaattccctattatattctgcatcagaaaaacaaacaaaacaaaaacaactttaaatgcttgtagcagaaccccgggtcatctcatgtcagaaacctttaatccaggcctaaatttgcatagacctgacattcagctgccttgcagttgcttcctcccatgagccaaggtggtgtcagagggcaactggatgactcgcagtaccacagcactgggacagacagaagccacacctttcttttgggtttttgccaagcctcctccatctcccatcagtgctgtgggctggctgcaagcctcgaaacagttctcctggaagggaggtttttgctttacccccgccagcacttccgcacacaatcatagagaacctctctgctctctgctggcctacagcttgtctgtttctcaagcagaggcaggaagagctagtcttagcatttatattttaataggaagttgactcccagcatgtaaaagtgatccacgcagccggagtgtatgccgggagctaagtggtctatgggtgaacatatcccaccttgcttcctgagtccttggtcccaatcttctcatttgttcctctcgttttaaattttttccccccaactcttttgatgtaagagttcagtttgtcttcgggagtgggtctctgcaagggctctgggatgagtcttggcttccaagaggacaggctattaggttcttggacttttttctgtgctaccgctgctgcttggtggaagtaacaggacgtggattctgcctcataagtggcagtttcccttttctctctgacttgtcctaggccgatttctctatggcttccctgagaaaggtgaggcccaaaggagagaggccttcaaactgtcccaggtcctgcgcagctcagtgcgtatcttcttgcttccatgtgtcttttcccctgctgcctcactccccacccccacttgccaggtgtttgagccatttctacaccaaagcaaagtacggcctcaggagggagtaaaaagggtgccatctgtgtctggaggggcagctgtgctcatgccctgtgctactggacatttcacaattctggcaccttgcgattggtcagtcaacctcagaaagtaactatcttgaaggtttgaaaaacaaccaaagaaagggagtgaggactatggctgcatgtcctctgcttgcccggctgcagagcagagatgtgcagccctctggtcagctggtccaggctggtccccgccggtccccttccagtccagccaccaagagtccacttgtcccgggcttccacctggctgacaggaagaatttctgagagctggatgtgcatgccctgtggacgaaggtacagctcgcctgcctgccccaatcccagccccgacaatcacatgcagctgactcggacactggccttgggaacaatgttcgagagaacacttgccccttgactgtaggagccagaaggggacccaggtgtgcatagctctctgtagacatttttacccaaacctgttggtaaagtgcccatctggtgctcaagagagcctgggggtctaacagggagcccggctgcctcacctggccacagcctccacaccagatctccacattgtcttgatccagaccagctctgtgatcagaaggaaattgggtccagtgtaggagagagctggtcctgggcctggcaggcaagagtgtgggcatcctttcctggcctttctccactctccctcaagcctgtgctcaggttgccttgaatgtggactctggaagagccaggggcccagaatgccgggggaggcttctgagtggcactcatggaacaccgtccctctgccagccataggccctgcctccagtgtcagggaatggaggctgggctgcgagagtgttgctgccccctgtgtcattcttctaatccaatgtagaaattgtacgtaatgtatttaaaccaacgcaaatgtatgaataacaaatacagttctg

SEQ ID NO: 18792 - DNA, 3176 bp, Homo sapiens
  CDS (127)..(1224)
aaaactgaaagccggaccccaggccgccgcgctgccgcccggcctccccgccagcgcgccaccatgggcagtcccggtttccccttgtaaagatggcggtgagggatcgctgcaacctttagactaatgactgtccgaaacatcgcctccatctgtaatatgggcaccaatgcctctgctctggaaaaagacattggtccagagcagtttccaatcaatgaacactatttcggattggtcaattttggaaacacatgctactgtaactccgtgcttcaggcattgtacttctgccgtccattccgggagaatgtgttggcatacaaggcccagcaaaagaagaaggaaaacttgctgacgtgcctggcggaccttttccacagcattgccacacagaagaagaaggttggcgtcatcccaccaaagaagttcatttcaaggctgagaaaagagaatgatctctttgataactacatgcagcaggatgctcatgaatttttaaattatttgctaaacactattgcggacatccttcaggaggagaagaaacaggaaaaacaaaatggaaaattaaaaaatggcaacatgaacgaacctgcggaaaataataaaccagaactcacctgggtccatgagatttttcagggaacgcttaccaatgaaactcgatgcttgaactgtgaaactgttagtagcaaagatgaagattttcttgacctttctgttgatgtggagcagaatacatccattacccactgtctaagagacttcagcaacacagaaacactgtgtagtgaacaaaaatattattgtgaaacatgctgcagcaaacaagaagcccagaaaaggatgagggtaaaaaagctgcccatgatcttggccctgcacctaaagcggttcaagtacatggagcagctgcacagatacaccaagctgtcttaccgtgtggtcttccctctggaactccggctcttcaacacctccagtgatgcagtgaacctggaccgcatgtatgacttggttgcggtggtcgttcactgtggcagtggtcctaatcgtgggcattatatcactattgtgaaaagtcacggcttctggcttttgtttgatgatgacatagtagagaaaatagatgctcaagctattgaagaattctatggcctgacgtcagatatatcaaaaaattcagaatctggatatattttattctatcagtcaagagagtaactgaaagacctgcgggactgattcacgtggggagaatgttcacagcactgtcacccggcttctccgcaggctttcctcttccccagtggcccactaatggtatcactccgagtctcaatggtctggctgtgttagactctctccttttgtgtttttacatgcagcactactcttggttttatttcagtctgacatagagttaactgcaatcagattgtagtctgatttatatgaataacggttgctaattttaggactgggtgaaagctatgccattcattatgtctggctgtattagaatgacatttcctatgaatgtctacggtctgttttaggtgtttgctaaacttctatggcttccagggtcttcttacaatgcattcctttaacttgtccctggaagcattgctacccattttcagcttctctgcctctcttctgatacaaggacagaagaattgggtagatattcaccttttaggggtgcaagtatagctttaagtttgtgcaagtgaaaatgttgaaaagtgagtaacctcgatattaaaatcatccttgacatgaaacagggtgaagagaagctgtccgtggcggctggtgttggctggcattggcactgggctgtgctgacctagccattacaattccaggggctaagaaggctcagggcagacaaagtcaagaggaggaagtttttgtggacaatgaaaagttattttcgtacctttctaccaaaaccaagtttcaggaaaataactctatgttgtttattttcagtgacacttatgtaaggccctgtgagttgtatttatcctgtatccggcactgctaagcttttcaaggtatctttccaatcctgctgatgtggcagtcaatggctgcagggctggcaaacctccccttagccagtcagcacggcattgttccttatcaggaataacaaaggtactacatctttccagccatcagcacgttgtacaacttaactttttaacatagtccgtctgtttactgaggcactggcgagtcccagggctgatacagaaccttccctagagggaataccagagttagctgggtatagaggtggctcaaaggaagtgtccgtgggcagggggaggaatgaacaaaatggcgctgtttctttggctcagactcctagaatgcttgacaagacagaatttttttggaagaacctcatctcactatagttacttttttcacttttgttatatatgtatttattagagcatttgaatattggtacctttaaaagggtcatttggtgttttgctgttgagctggtttttgagtcatagatcttggcttcctttagaagccacttaacttccatacactataataaactgtgaacatatttttgttacctaatgcatccactgatgaacatgcaaactttgggcataatgtgaactaaaattgaaatggaaaatgttagtggccattttgcaacaatgaagaggatagcactttatctagatgaaaactggatttcttatctttgaaatatcttgaactgtttattgctcagaacttaagtaagcatgccaacatttcgtttgtttatgcttgaagtgaaatgttttacttttcactggagaagacaaaacagggtgatcttcatgttattgttttatacaagtgatggaaatgtaccttgccttgtttagaggcaatttcacatttataaatatttttttttcctccatgaaacttacgcagtaatcactacctggaaggtgagttttgatctctttttaaggagaggcactttccaactgaaggtgattgatgtagggaaatgtttgtactatatagaatccatatatttgactgcaagttacaaagttttaagaacatgatggttggtctctaatatatttggaactgattcataagaaaagttattaaaattatctttgaaacac

SEQ ID NO: 18793 - protein, 366 aa, Homo sapiens
MTVRNIASICNMGTNASALEKDIGPEQFPINEHYFGLVNFGNTCYCNSVLQALYFCRPFRENVLAYKAQQKKKENLLTCLADLFHSIATQKKKVGVIPPKKFISRLRKENDLFDNYMQQDAHEFLNYLLNTIADILQEEKKQEKQNGKLKNGNMNEPAENNKPELTWVHEIFQGTLTNETRCLNCETVSSKDEDFLDLSVDVEQNTSITHCLRDFSNTETLCSEQKYYCETCCSKQEAQKRMRVKKLPMILALHLKRFKYMEQLHRYTKLSYRVVFPLELRLFNTSSDAVNLDRMYDLVAVVVHCGSGPNRGHYITIVKSHGFWLLFDDDIVEKIDAQAIEEFYGLTSDISKNSESGYILFYQSRE

SEQ ID NO: 18794 - DNA, 3220 bp, Homo sapiens
  CDS (226)..(1386)
gagttcggggccagcagccgtctacccggtgtcgcgttctgtgttgtggcggccctggatccggcgtcagggcgaccgggcggacgaggtggagccagagtctgtcaggcgggttggtgaagggcgcggggccgggcacggcgttgggagtgcgcggcagggaccggccaggcgggctgcaggcacctcagagcccgggacaccccctcaacgtccgcaggcgcgatgaaggcactgatcttagtggggggctatgggacgcggctacggccgctgacgctgagcaccccgaagccactggtggacttctgcaataagcccatcttgctgcaccaagtggaggcgctagccgcggcaggcgtggaccacgtgatcctggccgtgagctacatgtcgcaggtgctggagaaggaaatgaaggcacaggagcagaggctgggaatccgaatctccatgtcccatgaagaggagcctttggggacagctgggcccctggcgctggcccgtgacctactctctgagactgcagaccctttcttcgtcctcaacagtgacgtgatctgcgatttccccttccaagccatggtgcagttccaccggcaccatggccaggagggctccatcctggtgaccaaggtggaggaaccctccaagtacggtgtggtggtgtgtgaggctgacacaggccgcattcaccggttcgtggagaagccacaggtgtttgtgtccaataagatcaacgcaggcatgtacatcctgagccctgcagtgctgcggcgcatccagctgcagcctacgtccattgagaaggaggtcttccccattatggccaaggaggggcagctatatgccatggagttacagggcttctggatggacattgggcagcccaaggacttcctcactggcatgtgcctcttcctgcagtcactgaggcagaagcagcctgagcggctgtgctcaggccctggcattgtgggcaacgtgctggtggacccaagtgcccgcatcggccagaactgcagcattggccccaatgtgagcctgggacctggcgtggtggtcgaagatggtgtgtgtatccggcggtgcacggtgctgcgggatgcccggatccgttcccattcctggcttgagtcctgcattgtgggctggcgctgccgcgtgggtcagtgggtaagcctgtgggctgggctgggtggggagaggggcggggagtgtgcctgcctccctgacaaggcctatcctctcctggaggtacgcatggagaacgtgacagtgctgggtgaggacgtcatagttaatgatgagctctacctcaacggagccagcgtgctgccccacaagtctattggcgagtcagtgccagagcctcgtatcatcatgtgaggggatgcagtggggctggccgagccccggttttcccatcagcaaggggagtgctggcctgacacatcagaagaccctggacttgtcattatttgtctggggggcactgggtgaagctgaagctgttggacacctgccttctcatgtggacatcatctggcaggatccctgctgggcacaccccacaaaccccactccctcaagaagggccagggccagggctgtatggaataataatttaatgctcactgtggccctgactgaaagtcaagctcaggcacaattagggccatggctgggctcccaccaatgaggatacaggcaggcaaggaggttggatgtggtggtgtgggatacaggagaagggcaaagggagctcataaatagggcccagcctggctctgggttcaaaggtggaggttccaggatggcacaggctgtgagggctaggcagctgaggaggtagtactcgtattggctcccttctcccagtcctctacagacacgatggtggttttgcagaagaagcagtccttgttgttcatcaggtgctggttgatacaggctctacaacaggggaggggatgaggactgccctgcatgtacctactgctctccccaccaccaagctgtggggcccacttacttgcaggacttgtggccacagggctggaacacagcagagatggggtgggcatagcagatggggcagaggtcctcctcactggtgggctgcaggggggagagtgaagggtgggctggagttggatgcctggctatgtggatgtccgttgtgcctgtgtaggagtgcacacatattcaagtggcatggacctgtgcaccgtgttcccactcaccagggaggcagctgctgcctgggcagatgcagaggtcaggtgcgccagcatctgttccacttgggccagctcatcggcactgatataatccgcatctggggagtggtaggtagtgtcaagtcagaggtagctgaggatgtgatgcctcttgaatattcccagcctaggactttgctgttcttaaggctcctgacccgacccagccccagatttccctgacctgccccaccagcccactcacagctctgcagggagaagcgcttccggtcaggggctggcagagcagtgccaggtgctgggggctctggctgtcccaggagatagcatattgagcgtagctggaagcagggatctgccaggagcactgatgtggcttgctctctcctaggtaggggagggtgcaagggcagtcagaaggcttggggcctggctaaaagtctctcttgggattgccaatgaggagtgccatggctcgtacatgatcaccccccctgcatcctttccgtctccctgcttcccaaaccccaagtcctgtattctagtaaggtgccacacagcctgttttttttttttttttcttgagacgagtctcgctctgttgcccaggctggagtgcgatggcacgatctcggctcactgcaacctccacctcccgggttcaagtgattctcctgctttagcctcccgagtagctggaattgcagacgcccaccaccacgcccggctaattgttgttgtatttttagtagagacagggtttcaccaggttggccaggctggtctcgaattcctgacctcaggtgatccacctgccttggcttcccaaagtgctgggattacaggcgtgagccaccgcgcccggcctggggtaccactttaagaaggctcaggcgaaccaccttaagatagtgagagtctgcctgccccataatattatcagtccttcaaagtcacttcaaataaacactaacagc

SEQ ID NO: 18795 - protein, 387 aa, Homo sapiens
MKALILVGGYGTRLRPLTLSTPKPLVDFCNKPILLHQVEALAAAGVDHVILAVSYMSQVLEKEMKAQEQRLGIRISMSHEEEPLGTAGPLALARDLLSETADPFFVLNSDVICDFPFQAMVQFHRHHGQEGSILVTKVEEPSKYGVVVCEADTGRIHRFVEKPQVFVSNKINAGMYILSPAVLRRIQLQPTSIEKEVFPIMAKEGQLYAMELQGFWMDIGQPKDFLTGMCLFLQSLRQKQPERLCSGPGIVGNVLVDPSARIGQNCSIGPNVSLGPGVVVEDGVCIRRCTVLRDARIRSHSWLESCIVGWRCRVGQWVSLWAGLGGERGGECACLPDKAYPLLEVRMENVTVLGEDVIVNDELYLNGASVLPHKSIGESVPEPRIIM

SEQ ID NO: 18796 - DNA, 2117 bp, Homo sapiens
  CDS (18)..(1448)
tagaaaaaacatttgccatgaaggacttttcaggtgtttcagatgctgacaactcatccatgaaattgaaccaggatgtgctattagttaatgaatcaaaaaagggaatattagatgaagataatgaaaaagaaaaaagggactctttaggcaatgaagaatctgttgataaaacagcatgtgaatgtgtaaggagtccaagggagtctttggatgacctgtttcaaatatgttctccatgcgccattgcaagtggtcttcggaacgacctggctgaattgacaacattatgtttggagttgaatgtattgaattctaagatcaaaagcaccagtggacatgtggaccacactttgcaacagtactctcctgaaattctggcttgccagttcctgaagaagtacttttttctcctgaacttgaaaagagcgaaggagagtatcaagcttagttacagtaatagcccttctgtttgggatacttttattgaaggattgaaagaaatggcaagttccaatcctgtgtatatggagatggaaaaaggagatctaccaacaaggttaaagttactagatgacgaggttccttttgatagtccgttgttggttgtttatgctacccggttgtatgaaaagtttggggagtctgctcttcgatccttaatcaagttctttccatccattttgccatcggatatcatacaactttgtcatcatcatcctgctgagtttttggcctatttagacagtctggtgaaatcaaggcctgaagatcagcggtcatcttttcttgagtcccttctgcaaccagagtctttaaggttggattggctgcttttggcagtgtcccttgatgctccaccaagcaccagcacaatggatgatgaaggttatcccaggcctcattcacacttgctttcctggggttacagtcagctgatccttcatctaattaaacttcctgcagattttataaccaaagagaaaatgacagacatctgcaggtcttgtggtttctggcctggatatctaattctctgtttggagctggagagaagaagagaggccttcaccaatattgtgtatctgaatgatatgagcctgatggaaggggacaatggttggatcccagagaccgtggaggaatggaagcttctccttcatctcatacagagcaagagcacgaggccagccccccaggagtcactaaatgggagcctcagtgatgggccttcccccatcaatgtggagaatgtggcacttctgttagctaaggccatgggcccagatcgggcttggtcactgctacaggaatgtggtctggcccttgagttgtcagagaagtttaccagaacctgcgatatcctgaggattgctgagaaaaggcagagggccttgatacaaagcatgcttgaaaaatgcgatcggtttctctggtcccagcaggcctagtgggagaagattcagcaggatgtcatgacattttgagaaaaactaaatcatgctcctgaaccttctgaacgcatttgttattgaaggaaagacaccacccccaaatcctgccatcttattggggctacttttgtcagtgtctgtacccttggcatcggcatctgtgactctttatccatgacctcagtgtttcttaaccaaagttgtactcagcatttcttaaccaaagttgaattttgaaaagagtcagtccttgtttgctggaattagaatgttaatgtcctagtattattccgaactacagtattaactgcttgttgctagtggattagacagattcttttcttactgtggcttccatgttgggagcagaagcttttcatcctggtcacatgaagacagatggtattattgactggagttgaattatttttatatcttgtctggcacaatatggaaattaatgaaataagacggtgtataatggaattaacacccaaaataagtagaacactgaagatttgaatttgatatttaagtaaaatgggactgggtgcagtggctcaggcctgtaatcccaaccctttggaaggtaaagacgggaggatcacttgaggccaggagttcaagaccagcctgggcaacatagtgagaatgcatctctac

SEQ ID NO: 18797 - protein, 477 aa, Homo sapiens [sequence omitted]

SEQ ID NO: 18798 - DNA, 1770 bp, Homo sapiens
ataaataaaatccatatttcctctcatacagaccccagagttgctttgcctgacagtgtagttgatggagaaaataatctttatccttagcctccatctggttgcagaccataaagacagggaaaaaatgagggtgttggtagcttcgttagaaactgaaagctcactgattttttcaaaacctaaatagcctgtgtttctccaaataactaatttgcagccttcggcagccaggactggcagggatggggctagggggactggggagaactgctctctcctgagggtggtctgacccgacagcacgcatgaccttcccacagtcaggaactgctcagagacgtgatggcaactccatagaatgaaatactcttcagccagtaaaatgtatttttggataaatatttgctttaaaaaactttactatatgttgttaaatgaaaaaaaaaccttaaggcatcagaaattatgtgcagtaaaatctcacttttgtaaataaatatacctgtttactacgtatgcataaaaagaatcctgagaaatataagtactgtatgcatattgttgttaagtattttttctgtttgcttatctataattctaattttgcttcaaagaaaaagttactccggcaatataaaaataaaataactaatttgtcttgtcatcaaacagatagtaagaacaggcaaacctggccctccacactgccagccttttgtgattcaaggcttcagtttcctccacttgttaaaaagattcaacaaagtagttgaaatagtatgtgaaccagtaaaccctaaaaggtgtccagtgttgtctgtgagctaattaagtgatttgattctgactccccgagtcttctgatttcgaagcagtggggagtcagacaggagcctcaggtggcctctcctgagaggccctggaaagtgatgagaacctggcctctggcagctcttcataaacgtccatgttttccctctactctctcactcttttcccagggcctcaaacagaagatgaaaatcaatttctaaaacagccctctgtgtgctctctcgtatctctccttttcacacatcgtggtggtggctttctctgtgttcctctgttgattcagtctctggaattaacggatcaggattccatgcccagaatgctacaaagactgtgcttgagttctcccacatctcactcaattacacagaagtttcagattatgtaacagatgctgtgctgggttaggcagagccatctgacttgttttgctttattttagaccatgagatgggtgagtttttctttttaatgccacattcttttaagaattaaaaacctccacttggctgtcagcattggaaatcagagtgatggtgcaagccctgatgaggacaatgtccttgtctatgaaaaggtgaaatcattgcttgaaatcgctaagcaggacatgcagtcccagatggaggggggaattcgggagctggttggaaaagagtatttggcactttgcagccttgagaggtgcagaagagacaccgaggggttcaccaccagagccaccattgtcagagaggcgtccagctgtgtccacctgggactctgccttcagggcttcttgcctggctgggagctgcacaggcagactcctgggacggtgtgccgacagctctgggcacccccttctaggatctgattcctgaggaatcacaatgtggatttcacaatcacttccagtgtcttttgccaacctctgtgaacagatgtgcaatt

SEQ ID NO: 18799 - DNA, 2441 bp, Homo sapiens
  CDS (431)..(1216)
tactcaacatacaagcacttacactgcagagaaaccctatgactgcaatgaatgtgggacgtctttcatctggagctcttaccttattcaacataagaaaactcatactggagaaaaaccctatgaatgtgatagatgtggaaaagtttttaggaatcgctcagcctttacgaaacatgaacggactcacactggaataaaaccctatgaatgtaataaatgtggaaaagccttcagctggaattctcatcttattgtacataagagaattcatacaggagaaaaaccttatgtttgtaatgagtgtgggaaatctttcaactggaactctcatcttattggacatcagaggactcatacaggagagaaaccttttgaatgtactgaatgtgggaaatcattcagctggagctcccatcttattgcccatatgagaatgcatactggagagaaaccctttaaatgtgatgaatgtgaaaaagcttttagggactactcagcccttagtaaacatgaaagaactcattctggagcaaaaccatataaatgtactgaatgtggaaaatccttcagctggagctcccatcttattgcccatcagagaactcacacgggagagaaaccatataactgtcaggaatgtggcaaagcattcagagaacgctcagccctcactaaacatgagataattcattctggaattaagccctatgaatgtaataaatgtggaaaatcctgtagccagatggctcaccttgttagacatcaaaggactcatactggagaaaaaccctatgaatgcaataaatgtggaaaatccttcagtcagagctgtcaccttgttgctcatcggagaattcacactggtgagaaaccctataaatgtaatcagtgtgaaagatcctttaactgtagttctcacctcattgcacaccggagaactcatactggagagaaaccatacaggtgtaatgaatgtgggaaagcatttaatgagagttcatcccttattgtacacctaagaaaccatactggggaaaagccctacaaatgtaatcattgtgaaaaagcattttgtaagaattcttcccttattattcatcagagaatgcatagtggagagaaacgctttatatgcagtgaatgtggaaaagcctttagtggtcactcagccctacttcaacaccagagaaatcacagtgaagagaaactgaattgaatttatgcgagtttttcgtttcttgtacatttgacaacacattgaggaaaaccctataaacataatcaagaggggacatttttcattaagagttcagtaagacttctcccacattatttactagaaaatatcatcttagaagaaaccccatgaaggaaaagaatagggaaaagctttcagcagttatttagcccttactcaaaatcagataattaacaatgaaggaaactctaaactccccttatggtctaccagtaattcatacttgaggaccatgactgtggggaatgaggcatcttttagcaagagctctcaccaattgtagattggtgtgaattgctaagggaaaaaccttatgcagagaaaagtttttgactggaaatacactgttttgcatcaagctggagtactggatggaaaactctacaataacattttgtgcataattgtagaaatacagattttgttgttataaggggagggtctgggtgcccaggagtagaatatgaagtgctaaatctgaatgtaagaaaaataatagtattgaatggggtatttactgttgattaacctccttagagaaaattaatgaatgagatgactaacggtagaaaagttattgcctaggagtgtgagactgatgttgctggacagaaagtgatccttagcccagtgtgtcagcgtccattgttactcatcactgcattgttgggcaattagtttgtaatttgttttaggcaatcactataaattataattatggacactgcatcagtatacataacatgaaggaataaaaaggatacagaattgtatatacatacttactgtaacacatctaaaaaaatgtatatgggtaaggacctgaaagatccatggaaaagttaacccagttgagatttttaaaaagttttacaaatacatataacacttatgtgctgggctttcttttaaatgctttccaagtgttaacttgtttagtcccctttactctgagataggtactgttaccccagttttacaaatggctaagctgaagcagagatgttgaaggatcctacctaaggggcacaactagtaagggagtagagctgagattggctccagagttcttgttttcagccaccattttatgctgcctctccagtgattttttttcccattttcttcagtgtttctatagcagagatttgataataaaaagaaaatcctaaacaatgag

SEQ ID NO: 18800 - protein, 262 aa, Homo sapiens
MRMHTGEKPFKCDECEKAFRDYSALSKHERTHSGAKPYKCTECGKSFSWSSHLIAHQRTHTGEKPYNCQECGKAFRERSALTKHEIIHSGIKPYECNKCGKSCSQMAHLVRHQRTHTGEKPYECNKCGKSFSQSCHLVAHRRIHTGEKPYKCNQCERSFNCSSHLIAHRRTHTGEKPYRCNECGKAFNESSSLIVHLRNHTGEKPYKCNHCEKAFCKNSSLIIHQRMHSGEKRFICSECGKAFSGHSALLQHQRNHSEEKLN

SEQ ID NO: 18801 - DNA, 1899 bp, Homo sapiens
  CDS (1043)..(1348)
taaaactaactccaatacagcgtgaagccacaaatggaatgggaagctcaaaccctgaaccctgctctgcaatttctcttatttgctcttctgacacagtagggaaaaggaacctacttttcaaacttggctaagacatcagctacgacggttcgactttcaatggctttgtcgacgtggccgttgtattcaaacaaagcaaacatgttcctgctgtcctccatggccaggcctcggatcagcttctccaccacctggaagacacaccagggggacttcagttccacaggctgcggccccaacacgtgttcccagaacgtgccatcacctgatcccagagggagctgctggcacaagggcgtctccagcctcctaaaaatgttacccgtgtggtcatcccagaatttcaaaagtactattttccctttgttctcttgagattaggtttatctctttcttgctgaaaataactcagggtattttgcccatcggtagaggcagatgctgggctgatttcttgcaaacctatattaacaggaaaagcgggtgaaaagcttcagtcctgtcttttggctgataaatttatgaactccaaggaacaacagagactccagatgacgtttttttttttttccataagaagccttggggggtgggggtcggggtggtggttattggattaccacccttttggccaactggttttataatagtaagttcaaattttaaaaagaaaatgtgttcatctgatattcatctagctagtcacgtgcaaacaaacactttgttgcagaagcactgcaataaaccctcatcaaagtggctggacctgagccaggtctgcagctctgctagacactcagctgcttctcagattagcaagattatgtctcaggtactttatctctgtgtttccactcaatatatatatttttatctctatattcgtgtggttgcttctgggttacatgcatttccttagtattgagagctgtactaagcaaactgcaactgtgcaggacagccactctaatgctgcacaatgttcctgacgcaggtgtatctgcagcaaaggcatctaacagaacaagcagcagctgcctctcctcacctccccagcggtggtgtgggagttgatggtgatcttgcaggagccgccgccatggcaatagaccgtggatgtcatttcctgcctgtggatcagagcttctatttcatctcgggaaggcacaaactctcggcatttggttttcttaagagattcgtaagtgaagagagcgtatttttccatctcggttcctggaaactgttcccgtatcctaggaggcaaacactaactgttaatttttagactgatgggggctggctgctgggaggaactaggctgtgccaaggttctgtagaccaaagcagtgaatggccccccactggtgaatggagcaagcaccagtgacttcttggcaagggcccgcttcattttgtgcagttcaatttaaatacaaaaaacccctaaagagccaatgtctcactgggagcaactgtgctgccaactcacctctgcagcgttgttaatacttgaaagagtcatgcctcatcctatcatatgaaaattcttggccgggcgccgtggctaacgcctgtaatcccagcactttgggaggccgaggcgggtggatcacctgaggtcagaagttcgagaccagcctggccaacacggtgaagccccatctctactaaaagtacaaaaaattagccaggcgttgtggcgggcgcctgtagtctcagctactcaggaggctaaggcaggagaatcgcttgaacccaggaggcagatgttgcaatgagccgagatcatgccattgcactctagcctgggcaacaagagcaaaactctgtctc

SEQ ID NO: 18802 - protein, 102 aa, Homo sapiens
MFLTQVYLQQRHLTEQAAAASPHLPSGGVGVDGDLAGAAAMAIDRGCHFLPVDQSFYFISGRHKLSAFGFLKRFVSEESVFFHLGSWKLFPYPRRQTLTVNF

SEQ ID NO: 18803 - DNA, 2175 bp, Homo sapiens
  CDS (71)..(2173)
tggcaagacatttttgggttccaagttgccaaagtatggaacaaaatctgtaagaagtacattgcagccaatgccaaatgggacacctgttaatttattaggaacttccaagaatagtaatgtcaaaagttacatcaaaaataatggctctgattgtccatcatctcattcatttaattggaggaaagcaaataaatatcagctttgtgcacaaggtgtcgaagagcctaacaatactcaaaattcacatgataaaataattgatcctgaaaaacgtgttcctactcaaggaatgtttgataaaaatgggataaagggaggtttgaaaagtgtttctttattcacatcaaagctagcaaagccatccactatgtttgtgtcatctacagaggagttaaaccaaaagtctttttctggaccatctaatttgggtaaattcaccaaaggcacattattaggaaggacttcatattcttcgatcaatactccaaaatcacagttgaatggattttatggaaaccgatcagctggtagcatgcaaaggcctagagcgaactcctgtgccaccagaagcagttctggagaaagcttagctcaatccccagacagtagtaaatctattaattatgaaaaaatggtaaggtcacaaagtttttcacattccattcagaattcattccttccaccttcatctataaccagatcacattcctttaatagagctgtggatcttacaaagccttatcagaaccaacagctatccattagagtgcctctacggtcaagtatgctaacaagaaattcccggcagccagaagtactcaatgggaatgaacatttggggtatggatttaataggccttatgctgctggtggaaagaagttggctttaccaaatggcccaggtgtaacttctactttaggttatagaatggttcatccctctctactgaaatctagccgatctccattttctgggactatgacagttgatggaaataaaaattcacctgctgacacatgtgtagaggaagatgctacagttttggctaaggacagagctgctaataaggaccaagaactgattgaaaatgaaagttatagaacaaaaaacaaccagaccatgaaacatgatgctaaaatgagatacctgagtgatgatgtggatgacatttccttgtcgtctttgtcatcttctgataagaatgatttaagtgaagactttagtgatgattttatagatatagaagactccaacagaactagaataactccagaggaaatgtctctcaaagaagagaaacatgaaaatgggccaccacaggatatgtttgattcccccaaggaaaatggaaaagccttcagtaaaactgatgaatggatagatataagtgtctctgacaggagtgaatgtacaaaacatacttctgggaataatttggtttcaccagatacagactacagagctggttcttcgtttgaactctctccatctgatagctctgatggaacatacatgtgggatgaagaaggcttggaacccattggaaatgtccatccagttgggagctatgagtcctctgaaatgaacagcatagatattttgaataatcttgaatcatgtgaccttgaggatgatgatcttatgcttgatgtggatctgcctgaggatgcacctcttgaaaatgtggagtgtgacaatatgaaccgctttgaccgaccagacagaaatgttcggcagcctcaggaaggtttttggaaaaggccaccccagaggtggagtggacaggagcattaccacctcagccaccctgaccactatcatcaccatggaaaaagtgacttgagcagaggctctccctatagagaatctcctttgggtcattttgaaagctatggagggatgccctttttccaggctcagaagatgtttgttgatgtaccagaaaatacagtgatactggatgagatgacccttcggcacatggttcaggattgcactgctgtaaaaactcagttactcaaactgaaacgtctcctgcatcagcatgatggaagtggttcattgcatgatattcaactgtcattgccatccagtccagaaccagaagatggtgataaagtatataagaatgaagatttattaaatgaaataaaacagcttaaagacgaaat

SEQ ID NO: 18804 - protein, 701 aa, Homo sapiens
MPNGTPVNLLGTSKNSNVKSYIKNNGSDCPSSHSFNWRKANKYQLCAQGVEEPNNTQNSHDKIIDPEKRVPTQGMFDKNGIKGGLKSVSLFTSKLAKPSTMFVSSTEELNQKSFSGPSNLGKFTKGTLLGRTSYSSINTPKSQLNGFYGNRSAGSMQRPRANSCATRSSSGESLAQSPDSSKSINYEKMVRSQSFSHSIQNSFLPPSSITRSHSFNRAVDLTKPYQNQQLSIRVPLRSSMLTRNSRQPEVLNGNEHLGYGFNRPYAAGGKKLALPNGPGVTSTLGYRMVHPSLLKSSRSPFSGTMTVDGNKNSPADTCVEEDATVLAKDRAANKDQELIENESYRTKNNQTMKHDAKMRYLSDDVDDISLSSLSSSDKNDLSEDFSDDFIDIEDSNRTRITPEEMSLKEEKHENGPPQDMFDSPKENGKAFSKTDEWIDISVSDRSECTKHTSGNNLVSPDTDYRAGSSFELSPSDSSDGTYMWDEEGLEPIGNVHPVGSYESSEMNSIDILNNLESCDLEDDDLMLDVDLPEDAPLENVECDNMNRFDRPDRNVRQPQEGFWKRPPQRWSGQEHYHLSHPDHYHHHGKSDLSRGSPYRESPLGHFESYGGMPFFQAQKMFVDVPENTVILDEMTLRHMVQDCTAVKTQLLKLKRLLHQHDGSGSLHDIQLSLPSSPEPEDGDKVYKNEDLLNEIKQLKDE

SEQ ID NO: 18805 - DNA, 2061 bp, Homo sapiens
  CDS (1)..(1071)
atgaggcggacaggccccgaggaggaggcctgcggcgtgtggctggacgcggcggcgctgaagaggcggaaagtgcagacacatttaatcaaaccaggcaccaaaatgctaacactccttcctggagaaagaaaggctaatatttattttactcaaagaagagctccatctacaggcattcaccagagaagcattgcttccttcttcaccttgcagccaggaaagacaaatggcagtgaccagaagagtgtttcatctcatacagaaagtcagatcaacaaagagtccaagaaaaatgcgacccagctagaccatttgatcccaggcttagcacacgattgcatggcatcccctttagccacttcaaccactgcggacatccaggaagctggactctctcctcagtccctccagacttctggccaccacagaatgaaaaccccattttcaactgagctatctttgctccagcctgatactccagactgtgctggagatagtcataccccactggctttttccttcaccgaggacttggaaagttcttgtttgctagaccgaaaggaagaaaaaggggattctgccaggaaatgggaatggcttcatgagtctaagaagaactatcagagtatggagaaacacaccaaactacctggggacaaatgctgtcagcccttaggcaagactaaattggaaagaaaggtgtctgccaaagaaaacaggcaggcccctgtcctccttcaaacatacagggaatcctggaatggagaaaacatagaatcggtgaaacaaagccgtagtccagtttctgtgttttcctgggacaatgaaaagaatgacaaggactcctggagtcaacttttcactgaagattctcaaggccagcgggtcattgcccacaacactagagctccttttcaagatgtaaccaataactggaattgggacttagggccgtttcctaacagtccttgggctcagtgccaggaggatgggccaactcaaaatctgaagcctgatttgctctttacccaggactctgaaggtaatcaagttatcagacaccaattctaaatgtttgaagctttgtttctaaaagtaccttgaaatgatagagatgtaggaaaatatagttgtgggtggagagaggagtgagtttgtttaggtgggaaggtggcatgggatgaagttgtcattactgagcatcttctctgtgtaaataaagggcagtaccattgttaagacagtgggattggcatcatggctttccctcaggaaggtggtggctggtaaattccctgaatgagtctatgatgaacactgaggcagcacagtgggtatttatctctatgaaagtgccttttactcagcctgcacagagccatctctttgcccttccagatgtctgactgggaccttgcttatggatgtgtttttttttttttttttttgagatggagtctcgctctgtcgccaggctggagtgcagtggtgcgacctcagctcactgcaccctctgtgtcccggattcaagcgattctcctgcctcagcctcccgaatagcagggactacaggcatgcgccaccacgcccagctaattttttttggatttttagtagagacgaggtttcaccatattagccaggatggtctccatctcctgacctcctgatccgcccacctcagcctcccaaagtgctgagattacaggcataagccaccgcgcccagccagatgtgtgagcttttaatctctggctgatcttaacccacatcagcctaagcttgggatgattactcttgacccttttttttcagtgattagcaaatctccccacaacccaggtgtggagagaagagaggtagaatggtgctagtttcctattttatttttgtggtaactgtacagcactttaaagttatatactctatgtttaaatatctcccttaaaaagcctgagctgtacaacaatctggatgtgactctgttacccttttcccacaagataggagggaatcccctttgtaaaactatgaatccaaataaatgtttacaaagtg

SEQ ID NO: 18806 - protein, 357 aa, Homo sapiens
MRRTGPEEEACGVWLDAAALKRRKVQTHLIKPGTKMLTLLPGERKANIYFTQRRAPSTGIHQRSIASFFTLQPGKTNGSDQKSVSSHTESQINKESKKNATQLDHLIPGLAHDCMASPLATSTTADIQEAGLSPQSLQTSGHHRMKTPFSTELSLLQPDTPDCAGDSHTPLAFSFTEDLESSCLLDRKEEKGDSARKWEWLHESKKNYQSMEKHTKLPGDKCCQPLGKTKLERKVSAKENRQAPVLLQTYRESWNGENIESVKQSRSPVSVFSWDNEKNDKDSWSQLFTEDSQGQRVIAHNTRAPFQDVTNNWNWDLGPFPNSPWAQCQEDGPTQNLKPDLLFTQDSEGNQVIRHQF

SEQ ID NO: 18807 - DNA, 1579 bp, Homo sapiens
tatacttttatttcctgtttattcttaggtagattggaagggggaaacagtctgttctccctaattaaattttttctaataacgattagtagaatatggacattctatatgacagtgacattaaaagaggctctttggaagtatatacattattaacataatgtgtacaagtccttttgaaatgacaactttaatgggtttcagctcttttatctagagcttgagataattcaagctgagtttttcagggcatatcacaacggcaaagtgttcagcagtgggatatcaatgcttatttacattttcctactgctatttatataaaatgttattccattcagaggatgccttttatccccacattaaagcacagatcattaagcaataaaaaccaaattgtctgtcattcaaattataactgcagttatttttgcatggtaagagtgaggtgctaattttgtgtgagatgaactttgtaaactactttgggaaatgttctttggaagtaaggttttttctcctttagtcttatgcttccacttttgtctcagattcacaatccattaaaacatggggaaaaaagaaaaggtaaaattgagagacttttgttagaggagctatttggaatgaaccaacatttcagattttccaaaatgtaagttaggaagtctccattgtctctgcattaacaaaatacactgttactatcttaatctcaagagtgtcattacagtgagaatctcatttaaaagcataccagtgaaattaatagcagtgcttatcaaagaacactgaaatctgtgagaatctttctaggagcattcttttcttcttttagttccaagttccagggtatttttcattcctagtaggtttatatgactcacagaatgtggacttttttcctgtttggagtatttttgtaatgtaagtatcggatagctgcaccacagcatgcataaattgcacattttgttttactttctttatagaatatttaatttcaaaaatataatttatgccaaaaaaagcatacctttcaattttgctacttggttgatttagcacaaaatgcaaagtcttggggcagagagggggagtgaaaaaaattttataggtaattgttacaaaaatacctgtcagaaaccctaaagctgcattgtaaaacaaatggtgtaaactagttttgaaaagtggtaaggaattgtgaaaaaaatctcagacttaatgctctctaaccacatgagtttcttcttttttatttagtaatacgctgctacatatttggaggttctggtgtttgtaggtcactgaacagacattgaaatctgatttatattgtataactgtaacatagaaagaaaaagtatttatattttttctgtaagaatatttcattgagttgtgtataatttaaataagatttgtccccaaatggttttgctcaccttgattttttttgttgtgattttcttgtttttgtataatgtgtatagtttatgtcaagggcattaaaagcctcctgaagcataatcttatcaaagggatacattgttaataaaatgtacttaaaattctt

SEQ ID NO: 18808 - DNA, 1556 bp, Homo sapiens
  CDS (314)..(1402)
gtagttgcgagcgagagtgagtggggccgggacccgcagagccgagccgacccttctctcccgggctgcggcagggcagggcggggagctccgcgcaccaacagagccggttctcagggcgctttgctccttgttttttccccggttctgttttctccccttctccggaaggcttgtcaaggggtaggagaaagagacgcaaacacaaaagtggaaaacagttaatgaccagccacggcgtccctgctgtgagctctggccgctgccttccagggctcccgagccacacgctgggggtgctggctgagggaacatggcttgttggccccagctgaggttgctgctgtggaagaacctcactttcagaagaagacaaacatgtcagctgctgctggaagtggcctggcctctatttatcttcctgatcctgatctctgttcggctgagctacccaccctatgaacaacatgaatgccattttccaaataaagccatgccctctgcaggaacacttccttgggttcaggggattatctgtaatgccaacaacccctgtttccgttacccgactcctggggaggctcccggagttgttggaaactttaacaaatccattgtggctcgcctgttctcagatgctcggaggcttcttttatacagccagaaagacaccagcatgaaggacatgcgcaaagttctgagaacattacagcagatcaagaaatccagctcaaacttgaagcttcaagatttcctggtggacaatgaaaccttctctgggttcctatatcacaacctctctctcccaaagtctactgtggacaagatgctgagggctgatgtcattctccacaaggtatttttgcaaggctaccagttacatttgacaagtctgtgcaatggatcaaaatcagaagagatgattcaacttggtgaccaagaagtttctgagctttgtggcctaccaaaggagaaactggctgcagcagagcgagtacttcgttccaacatggacatcctgaagccaatcctgatggatgtggcatgtgatgacattgcacatgggcagttaactgtgccaagaagtgcagcagtagcagcaaccggagatgcaaagcccaacatgatggggagagaaactcttctttcaatatgtgcttctgtaccaaaagtggaatttcacgagagacatattttggaacatttttccttttgtgtgtgcgtgagtgtttccctgtttccagccaagggtattgtgagtttctcctgggcctccttcagaatctgggtgctctggaaagcagtgttttggcaacatggggaaagtatggcagtgtgggagggtcagctgggtctgggtttgaatattgcatttgaatattttaccagcattgatgtcggataaattatttagtccctgtaagcctcagttttctcttcttctacatacacataatatatttgactctttgttgtgattattggttacacatatgaagagcctggtgtggggcctggcacacaataggtgctcaataaataaaagttgataattt

SEQ ID NO: 18809 - protein, 363 aa, Homo sapiens
MACWPQLRLLLWKNLTFRRRQTCQLLLEVAWPLFIFLILISVRLSYPPYEQHECHFPNKAMPSAGTLPWVQGIICNANNPCFRYPTPGEAPGVVGNFNKSIVARLFSDARRLLLYSQKDTSMKDMRKVLRTLQQIKKSSSNLKLQDFLVDNETFSGFLYHNLSLPKSTVDKMLRADVILHKVFLQGYQLHLTSLCNGSKSEEMIQLGDQEVSELCGLPKEKLAAAERVLRSNMDILKPILMDVACDDIAHGQLTVPRSAAVAATGDAKPNMMGRETLLSICASVPKVEFHERHILEHFSFCVCVSVSLFPAKGIVSFSWASFRIWVLWKAVFWQHGESMAVWEGQLGLGLNIAFEYFTSIDVG

SEQ ID NO: 18810 - DNA, 1844 bp, Homo sapiens
  CDS (233)..(1087)
ctcggggactggcatcacgggagagtggccaggcgccccccacccgcagggcatgcccacctggacaggactgaaggctgctgccacctctgcagcgcctgccattctcacacccacccctctgcccagttttgctgcgtcgcgtgaaggatcctgcgctggcgcccccacctggtgatgccgagtccctgggggtggtttgctgtgactgcatgcggcgcgcagcgggtatatgtgcaggggaggaggagctatgtgcgcaggggaggaggagagatgtgcccaggggaggggcctgcaactctggtcactagaggtttggggcatagggtttgggaaggccaggaagcgtaaaggggcttctgggggtcccgaagtagcacgggagggtggggcagggctggtcacgcctcctgtgctcgggcagaacaacttcgaggagccagtggcactgcaggagatggacacaagcaacggggtcctattgcccttttacgatcccgactccagcatcgtctacctgtgtggcaagggcgacagcagcattcggtactttgagattaccgacgagccgcctttcgtgcactacctgaacacgttcagcagcaaagagccgcagcggggcatgggtttcatgcccaaaaggggactggatgtcagcaagtgtgagatcgcccggttctacaagctacacgaaagaaagtgtgaacctatcatcatgactgtgccccgcaagtcagacctcttccaggacgatctgtacccggatacgccaggcccggagccggccctagaagcggacgaatggctatccggccaggacgccgaacccgtgctcatttcgctgagggacggctatgtgccccccaagcaccgcgagctccgggtcacgaagcgcaacatcctggacgtgcgcccgccctccggcccccgccgcagccagtcggccagcgacgcccccttgtcgcagcacaccctggagacgctgctggaagagatcaaggccctccgcgagcgggtgcaggcccaggagcagcgcatcacggctctggagaacatgctgtgcgagctggtggacggcacggactagccccgcgcgccaggcaggcggagcggggcggggcgcacaagctcggccccgccccggcttttagtcccgaactccggaccccgccttcttgggctgggcccgggggcgggactggggagggaactccgcccctcgcgggagaccagaactcttggagcttaggggagacccacgtcgctccagcggaggctggactgcgagcctcgtctgggactcggctggagctggcctagggaggcctggggtaacctggggggctcagcaatggtgctgcacggcgaggtggtgtccccctttgtcctccgcccagggcagggaaagtgcttagtattagcgtgatgcttggggttattggagcctgagcttgacctcaaacgggtggcgatttgatgggtacccccaggctggggaaaatgacagcgcttctcctaatcagctcactggattccatcaccctgagcggtaaaccagatgggcgtcaccccagttctgcagacacatacacaacccgtttgctgcagagccggacccagtggctacacccacagcggtctgtggtagagaactctcttccttctttccaccgacaggggcgagggctgcttcctcgcggcagcccccgcgaagaaatctcgagagaactggcatgaggagttaggttcatcacaaatacacacacactgcccccaaccctctgccgttgcctctctcagaaaaacaagacgtactgaatgaaatattttactaagcgttc

SEQ ID NO: 18811 - protein, 285 aa, Homo sapiens
MCRGGGAMCAGEEERCAQGRGLQLWSLEVWGIGFGKARKRKGASGGPEVAREGGAGLVTPPVLGQNNFEEPVALQEMDTSNGVLLPFYDPDSSIVYLCGKGDSSIRYFEITDEPPFVHYLNTFSSKEPQRGMGFMPKRGLDVSKCEIARFYKLHERKCEPIIMTVPRKSDLFQDDLYPDTPGPEPALEADEWLSGQDAEPVLISLRDGYVPPKHRELRVTKRNILDVRPPSGPRRSQSASDAPLSQHTLETLLEEIKALRERVQAQEQRITALENMLCELVDGTD

SEQ ID NO: 18812 - DNA, 2462 bp, Homo sapiens
  CDS (70)..(1857)
aaacaagagaagcgagatggttccagcacaaatgatccttatgtggcttttagaaggcgtactgaaaaaatgcagactcgaaaaaatcgcaaaaatgatgaagcctcttacgaaaaaatgcttaagctgcgacgagatctaagtcgagctgttactattctagagatgataaaaagaagagaaaaaagtaaaagagagctattgcacttaacactggaaattatggaaaagaggtataatttgggcgactacaatggagagatcatgtctgaggttatggcacagagacagccaatgaaacctacttatgccatccccatcatccctattactaatagcagtcaatttaaacaccaggaagcaatggatgtgaaggagttcaaagttaataagcaagataaagccgatcttatccgaccgaaacggaaatatgaaaagaagcccaaagtcttaccatcgtctgccgctgctactccccaacagacgagtcctgctgcactgccagtcttcaatgctaaagatctgaatcagtatgactttcccagctcagacgaagaacctctctcccaggttttgtctggctcttcggaagctgaggaagacaatgatcctgatggtccttttgccttccgtaggaaagcaggctgtcagtactatgctcctcacttagaccaaactggcaactggccttggactagtcctaaagatggaggattaggggatgtgcgatatagatactgcttaactactctcaccgtaccccaaaggtgtattggatttgcacgaagacgggttgggcgcggtggaagggtcttactggacagagctcattcagactatgacagtgtgtttcaccatctggatttggaaatgctttcctcaccacaacattctccagtcaatcagtttgccaatacctcagaaacaaatacctcggacaaatctttctctaaagacctcagtcagatactagtcaatatcaaatcatgtagatggcggcattttaggcctcggacaccatccctacatgacagtgacaatgatgaactctcctgtagaaaattatataggagtataaaccgaacaggaacagcacaacctgggacccagacatgcagtacctctacgcaaagtaaaagtagcagtggttcagcacactttgcatttacagccgaacaataccagcaacatcaacagcaactggcactcatgcagaaacagcagcttgcacaaattcagcaacagcaagcaaatagtaattcctccaccaacacatcacagggttttgtttctaagactttggattctgctagtgcacagtttgctgcttctgctttggtgacatcagaacaactgatgggattcaagatgaaggatgatgtggtgcttggaatcggggtgaatggcgtccttccagcctcaggagtatacaagggcttacacctcagtagtactacaccaacagcacttgtacatacaagtccatcaacggcaggttcagctttgttacagccttcaaatattacacagacttcaagttcccacagtgcactgagtcatcaagtaactgctgccaattctgcaacaactcaggttctgattgggaacaacattcgattaactgtaccttcatcagttgccactgtaaactctattgccccaataaatgcacgacatatacctaggactttaagtgctgttccatcatctgccttaaagctggccgctgcagcaaactgtcaagtttccaaggtcccatcttcatcctctgtagattcagttccaagggaaaatcatgaatcagaaaagccagcactgaacaacatagcagacaacacagtagcgatggaggtgacgtagcttcctccgagtggaactgcagcctggggacttgattaggtgctatgcatcagtagcattttgaatgcaagggatgatggaaagcagcacatgcgtttctgtggcagctgtggggacttgacagcaatgctcatctctcatgcttcaatttttcttttcttactgttaataggaaaaaaatcaacatctgtaaattaagaatacagcaattatctgtacagtactgcatatttgtaatacccttgtatatatgttacttgaatacagaaatgttcatttgtgatgctttgcacttgggggtggggggtgggagggaaatcaattgcaacaaagagtgtgagatgtgagattgtgtagagatgaagtgtcatcacatcatgtgcatggtgcggaacctgctgttttatctatttattgtgccgtgtttacagttttttgtacactgtaccttcattggttcctgtgctgtagtaaatgtgttaggtagctgtggactccttggtattttgtaaatggtataacataacttggttcccctctgggtccttgagttttctgtgtatcatgtgaaaaaaaatggtgacatacatacagaattttac

SEQ ID NO: 18813 - protein, 596 aa, Homo sapiens
MQTRKNRKNDEASYEKMLKLRRDLSRAVTILEMIKRREKSKRELLHLTLEIMEKRYNLGDYNGEIMSEVMAQRQPMKPTYAIPIIPITNSSQFKHQEAMDVKEFKVNKQDKADLIRPKRKYEKKPKVLPSSAAATPQQTSPAALPVFNAKDLNQYDFPSSDEEPLSQVLSGSSEAEEDNDPDGPFAFRRKAGCQYYAPHLDQTGNWPWTSPKDGGLGDVRYRYCLTTLTVPQRCIGFARRRVGRGGRVLLDRAHSDYDSVFHHLDLEMLSSPQHSPVNQFANTSETNTSDKSFSKDLSQILVNIKSCRWRHFRPRTPSLHDSDNDELSCRKLYRSINRTGTAQPGTQTCSTSTQSKSSSGSAHFAFTAEQYQQHQQQLALMQKQQLAQIQQQQANSNSSTNTSQGFVSKTLDSASAQFAASALVTSEQLMGFKMKDDVVLGIGVNGVLPASGVYKGLHLSSTTPTALVHTSPSTAGSALLQPSNITQTSSSHSALSHQVTAANSATTQVLIGNNIRLTVPSSVATVNSIAPINARHIPRTLSAVPSSALKLAAAANCQVSKVPSSSSVDSVPRENHESEKPALNNIADNTVAMEVT

SEQ ID NO: 18814 - DNA, 2485 bp, Homo sapiens
  CDS (714)..(2483)
acagtgtgatttattctaacttgacaagagaacaggcccctgacatcagtcctaaatctgacaccttaacggattctcagatagacagagaccttcacaaattatctttactagctcaagccagtgttattacgttcccatccgattcacctcagaactcatcgcagctgcaaaggaaagtaaaagaagataaaagatgtttcacagctaaccaaaataatgttggagatacctcccgtggacaggttattattatttcagattctgatgatgatgatgatgaaagaatcctgagtcttgagaaactcactaaacaggacaaaatatgccttgagagggaacatccagagcagcacgtttcaacagttaatagtaaggaggaaaagaatccagtaaaggaagaaaagacagagactctttttcagtttgaggaatctgattctcagtgttttgagtttgaaagttcatctgaagtgttttcagtttggcaagatcatccagacgataataattcagttcaagatggtgagaaaaaatgtttggctcctatagccaatactacaaatggtcagggttgtacagattatgtatctgaagttgttaaaaaaggagcagagggcattgaagaacacacaagaccacggagtatttctgttgaagaatgttgtgaaattgaagtaaaaaagcctaagagaaaacgatctgaaaaaccaatggctgaagatcctgtgaggccttcatcttctgtcagaaatgagggccagtctgatactaataagagagatcttgtgggaaatgattttaaaagtattgatagaaggacttcaactcccaattcacgtattcagagagccactacggtttcacaaaagaagtcttcaaagctttgtacttgtacagaacccatcaggaaagttccagtttctaagacccctaagaaaactcattcagatgccaaaaaaggacagaatagaagttcaaattacctaagttgtagaacaactcctgctatagtgccgccaaagaaatttcgtcagtgtcctgagccaacttcaacagctgagaaacttggcctgaaaaagggtcctcgtaaggcatatgagttgtcccagcggtctttggattatgtagctcaattacgtgatcatggcaaaactgttggagtagttgatacccgaaaaaagactaaattaatttctcctcagaacctgtctgtcagaaataataagaaacttctgactagtcaagaacttcagatgcaaaggcagatcagacccaaatcacaaaaaaatagacgaagactttctgattgtgaaagtacagatgttaaaagagcagggtcacatacagcacagaattctgacatatttgtaccagaatctgataggtcagattataattgtacaggaggaactgaggtacttgccaacagtaacagaaaacagttaataaaatgcatgccttctgaaccagaaaccataaaagcaaaacatgggtctccagcaactgatgatgcttgccctttgaaccagtgtgattctgtagtgttaaatggaacagtaccaacaaatgaagtaattgtctccacttcagaagaccctctgggtggaggtgatccaacagcacgtcatatagagatggcagctttgaaagaaggagagcctgactccagcagtgatgcagaggaagataacttatttttaacccaaaatgatcctgaagatatggatttatgttcacaaatggagaatgacaattataaactcattgaactaattcatggaaaagatacagttgaggttgaagaagattctgtaagtcggcctcagttggaatctttgagtggcacaaagtgtaagtacaaagattgtcttgaaaccacaaaaaaccagggtgaatactgcccaaaacactctgaagtgaaagcagcagatgaagatgtatttcgtaaacctggcttgcctcctcctgcatctaaacctttgagacctaccactaagatttttagctcaaagagtacttcacgaattgctggtctttctaaatctttggaaacttcttcagcactttcaccgtctctaaaaaataagtcaaaggggatacagtcgattttgaaagtaccacagccagttcccctcatagctcagaagccagttggtgaaatgaagaattcgtgcaatgttcttcatcctcagtctccgaataattccaacaggcaaggttgcaaagttccatttggtgaaagcaaatattttccatcttcctctccagtaaacattcttttgtcatcacagtctgtctctgacaccttcgttaaagaggtcttaaaatggaaatatgaaatgtttttgaactttggtcagtgtgggccccctgcaagtctttgtcagtccatctcaagacctgtgcctgtcagatttcacaattatggagattattttaatgtttttttccctttgatggtattgaatacttttgaaacagt

SEQ ID NO: 18815 - protein, 590 aa, Homo sapiens
MAEDPVRPSSSVRNEGQSDTNKRDLVGNDFKSIDRRTSTPNSRIQRATTVSQKKSSKLCTCTEPIRKVPVSKTPKKTHSDAKKGQNRSSNYLSCRTTPAIVPPKKFRQCPEPTSTAEKLGLKKGPRKAYELSQRSLDYVAQLRDHGKTVGVVDTRKKTKLISPQNLSVRNNKKLLTSQELQMQRQIRPKSQKNRRRLSDCESTDVKRAGSHTAQNSDIFVPESDRSDYNCTGGTEVLANSNRKQLIKCMPSEPETIKAKHGSPATDDACPLNQCDSVVLNGTVPTNEVIVSTSEDPLGGGDPTARHIEMAALKEGEPDSSSDAEEDNLFLTQNDPEDMDLCSQMENDNYKLIELIHGKDTVEVEEDSVSRPQLESLSGTKCKYKDCLETTKNQGEYCPKHSEVKAADEDVFRKPGLPPPASKPLRPTTKIFSSKSTSRIAGLSKSLETSSALSPSLKNKSKGIQSILKVPQPVPLIAQKPVGEMKNSCNVLHPQSPNNSNRQGCKVPFGESKYFPSSSPVNILLSSQSVSDTFVKEVLKWKYEMFLNFGQCGPPASLCQSISRPVPVRFHNYGDYFNVFFPLMVLNTFET

SEQ ID NO: 18816 - DNA, 2166 bp, Homo sapiens
  CDS (502)..(1329)
gattccgtgttcttggccatgttagccataatatcctgtgcagtatgtttttcctgtgcagaggcaaaaacatattgggcatatgttcccaagcccccagcagtatgacccatactttggagtgacactcctcctaagatttatcatgattaaggagcatgggctccaggacccctaactccacctgacatagaacagttagactctcagaataatgtcattaattataccgctccattggaaggacttcctttgtgtgtcaccacaaagacatcactcagccatagctgtcttacagttcaagctcacacatggttgagtcactatgggaaaatcatgtacttattaagtcttggttatattaatgtaaccggtgtgctaaccaaccattcctggcccaatcgccttcattgtgctgactatacagaatggattcccttcaatagttcctacccccctccatagacccagtgtcttggcccactggctagaaaacaatctatgttaactggagacattgtggattggggacctaaaggccaattagatggaaaagaagaaaatcagaaatcgtggcacaaactttgctggcattggtggcaagcttttaatgcttcttctttatataacactgggatccaatcccagtcggccgcccagattgcttggcatggagcaggctttagcccgcctcttcctcagtggcattatctagggaggaaaggaccaattcaaaagatgatatggaaggcagcattcccatttatgaatggcaacatctgggttgccataatactatccaataatagcaatagtaagcaacacagtcttaatgttacatttgtaaagaatatcaccactcaatttacagtttgtgtttttaatccttatgtgtttttggcagctaagaaggaccagctccaggtaaacaatacccaattgacctgtaaatcttgccagttatatcactgcattaatcatagcacattgcaaacacataatatctctactttgatgattttaggttgcatccctgggctatggattcctgttaatctgtctgagccatgggctgccacaattgctttacattttgtgaaacttcttctaactcagtttactcattgtgtccgtagaggcttaggcatgataatttttgctattgtttacttggtcacactaataatttctgttgtgatgtcctctgtagctttgcatagttctattcaaacagctcagtatgtggagaactggacacgcacagtcaaccaagggtggctacttgagaataaaattaacactgagttacaaactgaagtggcagtgttataatccacgattctatggttaggggaacaagtacaaagcttgcaattgcagcagtaattgtgttgtcattttaatcacactcatatttgtgtaaccaacttagaatataaccaaagtgagtatccatgggatcttgtgaaagcccatttgcagggagctttcacatccgacatcacctttgatattggtgaattacaaaacaaaattcttgatttaaataaacaaattccagagtttcagccttctttagaagactggactgaattccagcaaggcctggagagcgtcaacccttggacctatctaaagcaccacattaacatcttatatatagttcttggaataatgttgttttgtctctgtcttctgttcatagtctgtaaaatcggatggactgccaatcggagaatgaaagctacccagcctggccttacattctttcacttaatacataaacaagaagggggaaatgttgggagccaaaaaggccaaagggatggtgaccaactcagcattccactggaggctacatgatcaaacagcaaactgtttatcatgaatacagaatgtgggcaaactcgcttctgtgcctgcccagaaggtttgctgagggccatcgctccctggccccggctccttgaggttatctactgggacatctagagcctattgttcgaggaatgcagtcttgcaagcctactctggaccgagcagctgacctcttcttccacaccccttctcactatctcttttgcctaataaatatggagggctgtgtaaagctcagggcccttgtccactagaggcaaggtgtcccctgacccttcttccaaacat

SEQ ID NO: 18817 - protein, 276 aa, Homo sapiens [sequence omitted]

SEQ ID NO: 18818 - DNA, 2326 bp, Homo sapiens
  CDS (408)..(2324)
aaggatgaaagcctgaactagagcagtggaaatgcgaatgtggagcagaggaacgattcaagaaattctgcggtaaaactcatcagacttcatcactgattaaagattgtcttctcctccaaggtctacatgattacctgaagtttaataataatgcaagaagtgtttgtgggaagcagagaagcaagcaactgtatttcttgttctcacctaagcattactggaggataagccacatcagtctacaaagaggttttcatacaaacataataagatgtaaatggaccaaaagtgaagcacattcttgcagtaagcactgttactctccgagcaaccatggtttacatattgggattttgaaacttagcacttctgctcccaagggacttacaaaagtgaacatttgtatgtcccgtattaaaagtactttgaactctgtttcaaaggctgtttttggcaatcaaaatgaaatgatttcacgtttagctcaatttaagccaagttcccaaattttaagaaaagtatcggatagtggctggttaaaacagaaaaacatcaaacaagccatcaaatctctgaaaaaatatagtgacaaatcagcagaaaagagtccttttccagaagagaaaagtcacattatagacaaagaagaagatataggtaaacgcagtctttttcattacacaagttctataaccacaaaatttggagactcattctactttttatcaaatcatattaattcatatttcaaacgtaaggaaaaaatgtctcaacaaaaggaaaatgaacatttccgggacaaatcagaacttgaagataaaaaggtagaagaggggaaattaagatctccagatcctggcatcctggcttataagccaggctcagaatctgtacatacggtggacaagcctacaagtccttctgcgatacctgatgttcttcaagtttcaactaaacaaagtattgctaactttctttctcgtcccacggaaggtgtacaagctttagtaggtggttatattggtggacttgtccccaaattaaagtatgattcaaagagtcagtcagaagaacaggaagagcctgctaaaactgatcaggctgtcagcaaagacagaaatgcagaggagaaaaagcgtttatctcttcagcgagaaaagattatcgcaagggtgagtattgataacaggacccgggcattagttcaggcattaagaagaacaactgacccaaagctctgcattactagggttgaagaactgacttttcatcttctagaatttcctgaaggaaaaggagtggctgtcaaggaaagaattattccatatttattacgactgagacaaattaaggatgaaactcttcaggctgcagttagagaaattttggccctaattggctatgtggatccagtgaaagggagaggaatccgaattctctcaattgatggtggaggaacaaggggcgtggttgctctccagaccctacgaaaattagttgaacttactcagaagccagttcatcagctctttgattacatttgtggtgtaagcacaggtgccatattagctttcatgttggggttgtttcatatgcccttggatgaatgtgaggaactttatcgaaaattaggatcagatgtattttcacaaaatgtcattgttggaacagtaaaaatgagttggagccatgcattttatgacagtcaaacatgggaaaacattcttaaggataggatgggatctgcactgatgattgaaacagcaagaaaccccacatgtcctaaggtagctgctgtaagtaccatagtaaatagagggataacacccaaagcttttgtgttcagaaactatggtcattttcctggaatcaactctcattatttgggaggctgtcagtataaaatgtggcaggccattagagcctcatctgctgctccaggctactttgcagaatatgcattgggaaatgatcttcatcaagatggaggtttgcttctgaataacccttcggcattagctatgcatgagtgtaaatgtctttggccagatgtgccgttagagtgcatagtatccctgggcactggacgttatgagagtgatgtgagaaacacggtaacatacacaagcttgaaaactaaactttctaatgttatcaacagtgctacagatacagaagaagtccatataatgcttgatggcctgttacctcctgacacctattttagattcaatcctgtaatgtgtgaaaacatacctctagatgaaagtcgaaatgaaaagctggatcagctgcagttggaagggttgaaatacatagaaag

SEQ ID NO: 18819 - protein, 639 aa, Homo sapiens
MSRIKSTLNSVSKAVFGNQNEMISRLAQFKPSSQILRKVSDSGWLKQKNIKQAIKSLKKYSDKSAEKSPFPEEKSHIIDKEEDIGKRSLFHYTSSITTKFGDSFYFLSNHINSYFKRKEKMSQQKENEHFRDKSELEDKKVEEGKLRSPDPGILAYKPGSESVHTVDKPTSPSAIPDVLQVSTKQSIANFLSRPTEGVQALVGGYIGGLVPKLKYDSKSQSEEQEEPAKTDQAVSKDRNAEEKKRLSLQREKIIARVSIDNRTRALVQALRRTTDPKLCITRVEELTFHLLEFPEGKGVAVKERIIPYLLRLRQIKDETLQAAVREILALIGYVDPVKGRGIRILSIDGGGTRGVVALQTLRKLVELTQKPVHQLFDYICGVSTGAILAFMLGLFHMPLDECEELYRKLGSDVFSQNVIVGTVKMSWSHAFYDSQTWENILKDRMGSALMIETARNPTCPKVAAVSTIVNRGITPKAFVFRNYGHFPGINSHYLGGCQYKMWQAIRASSAAPGYFAEYALGNDLHQDGGLLLNNPSALAMHECKCLWPDVPLECIVSLGTGRYESDVRNTVTYTSLKTKLSNVINSATDTEEVHIMLDGLLPPDTYFRFNPVMCENIPLDESRNEKLDQLQLEGLKYIE

SEQ ID NO: 18820 - DNA, 2362 bp, Homo sapiens
gttttctaagacctccctggcccgccatacgccgatcctgaacctacgaaaacccaagactgcgggcacggtggctcatgcctgtaatcccagcactttgggaggccgaggcgggcagatcacgaggtcaagaagtcgagaccagccttgctaacatggcgaaaccctgactctactgaaaatacaaaaattagctgggcgtgatggcgtgcgcgcctgtagtcccagctgctcgggaggctgaggtaggagaatcgcttcaatccgggaggtggaggttgcggtaagcagagattgcgccactgcactctagcctggcgacagagactccttcaaaaacaacaacaacaacaacaacaaaacaaaacctcccaagaccctagtgggcagacacacagccagccagacatggagaggagcacattagcagaagaagacgcaagtggctggtcctcgagaggacgttgagaggagcatgccagcagaagagcacacaacgacaggcaccgacacaccaccggcaggccatgcaccagcagaatgatgcggagtttgacggggcagtcagagaagagcctgggccgccaaggggcccgactccaggggaaaaccatctcccttctggctcccccatctgctgagagctacttctactcaataaaaccttgcactcattctccaagcccacgtgtaatccgattcttcagtgtcacctcccaaatgtggaaatgcattgtctttcttctttcctaggccagtggtcctcaaacttgagcaggtttaagcatggtcatagcagaatcaatgtgctcaccccatcatgaaaaaaaaaatgtgttaatgaattgattactactttgagtgtgccatattttaaagacgaagagaaactaatcaagttagtttttatttggtcagaggcttgtttgtgcctgcttatctaaagttataaaggccccaaatatggctccgtgttgcagagggactgtctcttcttatatcgacagagcccatattcacaatgtatcacacttacctcgatgtattgtctggagtttcctaggctgtgtcctttgcctggaatgctctctcttgctggctggcttcttcccaccagctgtggccagggctgctccttattccttcatcaaaactccgtctgctgggtgtggtgcctcacacctgtaatcccagcactttgagaggccaaggtgggagtatcgtttgagcccaggagttcaagacaagcctggacaacagagcaagaccctgtctctaccaaagaaaagaaaagaaaagaaaagaaacagccactttctcttccatgagccagtttatgttttcttcacggcatttgttacaaatcacaaatgtggaggaaaaatgaaggcaaagcaaaataacaggcaagtctgaaaacaaaagtgttgccagtcacgctaagcctcaggcacgcattctgaatgaagctaaagtttaaagtcccctctgatagatttgtgacttaaatgtccacactagcaagtgtgtttctcacatggagaagtagcacgattttatgtcaggaaagggatgagaacatgcttcttgaacacatacaatgctgaagacatttcctggaaaaccattggcctttgcttaggacagttgcatcacacagagatgtttgtggttcagatttataagaaacatgggaactgaagccaaagcactacttttgctcagtataaccaggtgccagatctaaagtgttaggcaggttcctatatgtatgttagaaaaaagttgcccaagttttggacaattccttttccatctctcttacaagtcaacaaatcgaagcaataaactattctctgaagaaaacaaatttatttggttgattcaaacttttaatgagactattactcccctgtgtgcctttcctttctctggttctagaaatacatctagaaagggggaaaatgttaatatattttctactgactttatatcacaaatgcttagcttagagggtggactctgaggaacagtgtcctttccaaatattataaaactttgtgttcattctggaaaaacaaacaaaattaatcacaatgatttcctgctttggagcaatgagaaatgggagggaaacttcaccttttcatagcttttgatgtttgcaccatgtgaattacccacccccaaatttaaaatacgaatttttgaaaaagtgtttacctctgagaagagaaactagtagtgaagaatgaggagctgtagatttttaacgattctgatgtatttgcgtttttcccaatgttcatgaataaataaatgtgcattcataattaaaaagaataaacaacctggaaaaaac

SEQ ID NO: 18821 - DNA, 2768 bp, Homo sapiens
  CDS (1419)..(2555)
aagagcagtaacacaaacagggctgaaacacgccctcctcccgtccccacacccccgcgacttgccatgttgcgggtgatgtgaaggagagaagtgctgtggcccttcagggagcacagacctaggggctccctgagccagggctgtgacaccctctttggggctctgcggtttctggtatcttcaaacttccgggcaccactgcattccccttgtccagacacaggtgcccacagcagaagccgcttgtggttcatcagatccagctgcagacttgcatagaaccggcgcctttgccggcgcctggagctgcctgcccagctgcagcagctggtgtgtccggctctgcgcagtggccagaccctgcgttcgctcgcctgcacacccctcgctgttccgtgcctggctcaccctcggcaggcgtggaatcctggctggtagcatgagctgagcacagcctgccaggccacgtcagtggaacaagtctggcgggcctgatcaaaactcaggcaaaggcaccactggtcacagagctttctagctggaaaagcaacacctgaaggatcccgtgacacaatcaacctgctaggagatccctgccaccctgagaggctgcaggaagctgcctccatccaggcctcttcacagaaggagaattgcagagaccgtaggatttttctactcacaggaacagatggtgtccggtcaggaaggtaaaatgcttcaagaaaagtgcaatagggattataatactgatgatctgagactctgataatgactctgagatgattcccaattctatgatgaatcatctcagaatgactccgagatgatgattcctgattctacgatgattgaggcagagctcactggttggtgaatctagttggtagagctgaggcaccgcaataccatcatttctttctgaggaaatctaaagatgaaagaattcatcactaaaactgtactacgagaaatgctaaaggaagttgttcaaactgatggaaaattataccagatggacacttgaatttgcccaaaggaatgaagagcaccagaaatggcaaatgtgtggtcttactgtatcttcatgtcagtgtcatatcaaggacaagacagcagaaatggtccactccagttgcagatagtaaagaccctgtagctccagcatcagctcacctttctggttttgaatttcatgcttattaccatcctgtcatcacctactgtttccatggtagacgggactaagagatgggctttgtgccttgggcaaagggcagcttactcctggaagaggactgactcaaggaccccagaaccccaagaaacagggaatcttccacattcatgaagttcgagataagttgcgggagatagtaggagcatccacaaactggagagaccatgtgaaggcaatggaagaaaggaaattacttcatagtttcttggctaaatcacaggatggactgcctcctaggagaatgaaggacagttatattgaagttctcttgcctttgggcagtgagcctgaattacgagagaaatatttgactgttcaaaacaccgtaagatttggcaggattcttgaggatcttgacagcttgggagttcttatttgttacatgcacaacaaaatccactccgccaagatgtctcctttatcgatagttacagccctggtggataagattgatatgtgtaagaagagcttgagcccagaacaggacattaagttcagtggccatgttagctgggtcgggaagacatccatggaagtgaagatgcaaatgttccagtcacatggtgatgaattttgtcctgttttggatgcaacatttgtaatggtggctcgtgattctgaaaataaagggccggcatttgtaaatccactcatccctgaaagcccagaggaagaggagctctttagacaaggggaattgaacaaggggagaagaattgccttcagctccacgtcgttactgaaaatggcccccagcgctgaggagaggaccaccatacatgagatgtttctcagcacactggatccaaagactataagttttcggagtcgagttttaccctctaatgcagtgtggatggagaattcaaaactgaagagtttggaaatttgccaccctcaggagcggaacattttcaatcggatctttggtggtttccttatgaggaaggcatatgaacttgcgtgggctactgcttgtagctttggtggttctcgaccgtttgtggtagcagtagatgacatcatgtttcagaaacctgttgaggttggctcattgctctttctttcttcacaggtatgctttactcagaataattatattcaagtcagagtacacagtgaagtggcctccctgcaggagaagcagcatacaaccaccaatgtctttcatttcacgttcatgtcggaaaaagaagtgccattggttttcccaaaaacatatggagagtccatgttgtacttagatgggcagcggcatttcaactccatgagtggcccagcgaccttgagaaaggactaccttgtggagccctaagaacaccacatttgttgaaaactagcactctacccacagtgacgtggtatctgatgaagacctgatcgagtgtattgattttagtattgcttcgtgtcctccacacaggaggaggatgtattcagcctttaggatgatcagaaaagcagaaagagagagtggccggatggggctgaggggagaaagaattattaaacaataaatactttc

SEQ ID NO: 18822 - protein, 379 aa, Homo sapiens [sequence omitted]

SEQ ID NO: 18823 - DNA, 2530 bp, Homo sapiens
  CDS (79)..(696)
ctgtacaagtttactgctagtgcctcacatacagagagaaaactgaaacaggcaataaactattcaaaaagtttagacatggagaaaggagttgagaatgacctaagctatcagaatatagaggaagaaattgttgagcttccagatttggattacctgcgaaccatgactcatatagtctttgtagattttgataactggtcaaacttttttggtcatctaccagggcatctaaaccaaggaacatttatttggggctttcaaggaggaaacaccaattggaagcctccgctcaactgtaagatttataactacctgaacaggattggatgcttcttccttcatcctcgctgtagtaaaagaaaagatgctgctgattttgccatatgtatgcatgctggccgtctagatgaacaactacccaagcaaattcctttcaccatcctctcaggagatcaaggttttctggagctagagaatcaatttaagaagactcagaggccagctcatatactaaaccctcaccacttagagggagatatgatgtgtgccttgttaaatagcatatctgataccaccaaagaatgtgacagtgatgataacatgggtgccaaaaatacttcaataggagaagaatttatatccacagaagatgtggaattagaagaagctattagaagaagtcttgaggaaatgtaattaaagatattaccacacaacatcaagtggccttgaagagactgagataacgaattcttgagtttgttttctaaaggagaccagaaatccactattacaaatgtatttgaaaacatgtttttgctttcatatgttcaaaatctgatctttgttttgtatttttgtgctaatgtgcaaacatgtacagaagaaatagaatacatgttcatgcaaatataaattatgtattctaatataggtgtaacagtttcccagttaactttgaatttatatatttagatttaaaggattaaaaaaaaggaaagctcttgacagttgtttcccaaatagcattagttctttaattttatttgtactgtacaaatgatgctagtttatttttttagcagtgaaaatgaatataaaaaaggtgacataggtcaagttttccataaattctacttctcatgtggcactattatataatacctttgagatctttgtttatgtttattagaagagggtaatggaaactgatcatggaaacatttaaaattttatcagcaatgttctttgtgggtgccatgcatatgtaaattattgctttaattagagcagcacattgctaaaataaaaaatacaccttaatttttaagaaataatttaaatgaaacaatttccattccttttacctgcttagacttttatgtgacttgtatggtctcctggttaaagggaatggtgtcagaatatttgcataaaattatttttcataacagtccttttttatatattggtgtaaacataatattcttcaagaaataatgttgaaagcctactcaggaataatcttccttaactctttaaatttttatttcatgtgaagtgttttcagtttagttattcactgaattgtcagtttccttcatttggtattacatatttaattcttaaatattgaggccccattgtgagtaataaaaaatacgacataagtagaagactaagaagggcttgtcatattatctttgtgtatatgcttcatgttatttaaccagaaatgtcttatctctaaaaatttttagtagtaattatttaccaaacttaaaaacatttctataaatataaagcttttctttatatttaagacaaaatataaaggctagaatttggttccttctctgtaacactaaatattttagtgtgaaattgaatttttttattactatagtcttttcaatctataatttgtgtttttaatttcttgatatgtcacttctgttcctccctgcttgcattttttaaaaactagacattgtggcttgagaatttatcaatcatctttccgaaatgaccacattgtgcttttagtttgtatgtttaagtggtcaagcaaggctctaggaggtagtcactgagctggaccttaaacacatctgcaggagctcacaaaatgggagcaaaagaggcattccagaaagaagagtagttaagcagatgtgggggcagggcaagaggagacagcaccttgttgccagagattctacacaaaggtgtgatggacactgatgctctattaagaagcttttgtggtgtgtgtggtagagaataattaaggcttctgataagacaggaaagggatatttcatcatgactgttaagaaaaggtaactgggttgtttaatgttttaattgataattgtcactgatcgtatttctacttgttaaataattaaaaatcatcttaaaattcatactttgactttaatttagacacaaggagatgtaatcgctgtgtaacatcagagaaagctatatggattatcgtcagaagtaaatgtttctaacattg

SEQ ID NO: 18824 - protein, 206 aa, Homo sapiens
MEKGVENDLSYQNIEEEIVELPDLDYLRTMTHIVFVDFDNWSNFFGHLPGHLNQGTFIWGFQGGNTNWKPPLNCKIYNYLNRIGCFFLHPRCSKRKDAADFAICMHAGRLDEQLPKQIPFTILSGDQGFLELENQFKKTQRPAHILNPHHLEGDMMCALLNSISDTTKECDSDDNMGAKNTSIGEEFISTEDVELEEAIRRSLEEM

SEQ ID NO: 18825 - DNA, 1871 bp, Homo sapiens
  CDS (715)..(1680)
gttttgccggcagcccccgggcagcgttcatagctcctgcccgggcgggcgcgcggcggcggcggcagaggcggctgagcctgagcggggatgtagaggcggcggcagcagaggcggcactggcggcaagagcagacgcccgagccgagcgagaagagcggcagagccttatcccctgaagccgggccccgcgtcccagccctgcccagcccgcgcccagccatgcgcgccgcctgctgagtccgggcgccgcacgctgagccctccgcccgcgagccgcgctcagctcgggggtgattagttgctttttgttgttttttaatttgggccgcggggagggggaggaggggcaggtgctgcaggctcccccccctccccgcctcgggccagccgcggcggcgcgactcgggctccggacccgggcactgctggcggctggagcggagcgcaccgcggcggtggtgcccagagcggagcgcagctccctgccccgcccctccccctcggcctcgcggcgacggcggcggtggcggcttggacgactcggagagccgagtgaagacatttccacctggacacctgaccatgtgcctgccctgagcagcgaggcccaccaggcatctctgttgtgggcagcagggccaggtcctggtctgtggaccctcggcagttggcaggctccctctgcagtggggtctgggcctcggccccaccatgtcgagcctcggcggtggctcccaggatgccggcggcagtagcagcagcagcaccaatggcagcggtggcagtggcagcagtggcccaaaggcaggagcagcagacaagagtgcagtggtggctgccgccgcaccagcctcagtggcagatgacacaccaccccccgagcgtcggaacaagagcggtatcatcagtgagcccctcaacaagagcctgcgccgctcccgcccgctctcccactactcttcttttggcagcagtggtggtagtggcggtggcagcatgatgggcggagagtctgctgacaaggccactgcggctgcagccgctgcctccctgttggccaatgggcatgacctggcggcggccatggcggtggacaaaagcaaccctacctcaaagcacaaaagtggtgctgtggccagcctgctgagcaaggcagagcgggccacggagctggcagccgagggacagctgacgctgcagcagtttgcgcagtccacagagatgctgaagcgcgtggtgcaggagcatctcccgctgatgagcgaggcgggtgctggcctgcctgacatggaggctgtggcaggtgccgaagccctcaatggccagtccgacttcccctacctgggcgctttccccatcaacccaggcctcttcattatgaccccggcaggtgtgttcctggccgagagcgcgctgcacatggcgggcctggctgagtaccccatgcagggagagctggcctctgccatcagctccggcaagaagaagcggaaacgctgcggcatgtgcgcgccctgccggcggcgcatcaactgcgagcagtgcagcagttgtaggaatcgaaagactggccatcagatttgcaaattcagaaaatgtgaggaactcaaaaagaagccttccgctgctctggagaaggtgatgcttccgacgggagccgccttccggtggtttcagtgacggcggcggaacccaaagctgccctctccgtgcaatgtcactgctcgtgtggtctccagcaagggattcgggcgaagacaaacggatgcacccgtctttagaaccaaaaatattctctcacagatttcattcctgtttttatatatatattttttgttgtcgttttaacatctccacgtccctagcat

SEQ ID NO: 18826 - protein, 322 aa, Homo sapiens
MSSLGGGSQDAGGSSSSSTNGSGGSGSSGPKAGAADKSAVVAAAAPASVADDTPPPERRNKSGIISEPLNKSLRRSRPLSHYSSFGSSGGSGGGSMMGGESADKATAAAAAASLLANGHDLAAAMAVDKSNPTSKHKSGAVASLLSKAERATELAAEGQLTLQQFAQSTEMLKRVVQEHLPLMSEAGAGLPDMEAVAGAEALNGQSDFPYLGAFPINPGLFIMTPAGVFLAESALHMAGLAEYPMQGELASAISSGKKKRKRCGMCAPCRRRINCEQCSSCRNRKTGHQICKFRKCEELKKKPSAALEKVMLPTGAAFRWFQ

SEQ ID NO: 18827 - DNA, 2142 bp, Homo sapiens
  CDS (28)..(357)
tttttaaccacctttactctcttctacatgaagagttggtggcttaatatgaaaatccaggttattttgtggccttatcccctaaaatattttaggcattaccatatcagtttttatttttatgtttatttattattattattttttgagacagagtctcactgtcttgcccaggctggagtgcagtggcctgaacttagctcaccgcaacctccacctcccgggttcaagcaattctcctgcctaagcctctcgagtagctgggactacaggcgtgcgccaccatgcccggctaatttttgtatttttagtagagtcgggggtttcactatgttggccaggctggtctcaaactcctgaccttgtggtccacccgcctcagcctcccaaagtgctgggattacagtcatgagccaccatgcccagcctaccatatcagtttttaataacttgaactgaaattattggcttggtaatatttgggcaggccattaattctcattagaaaattacttaatatttcaaaaaattgaataaaactggtaatctttgtggaggcccattttgcaagtggaaacctgtatttatacattagtttgtctttaactatttgttaacagattttaacagttcaaatgaaagatgttaacgagatgcagtttgagtctgggatactcagaatagatccagaacctttattcagggacactggttgagttggtacagatgcattcagttgtcattcattcgtgttaagccaagatcctggatcttctatcattaatgctaagaggaaacatgaattacaactatattgtatgactgccatattttattgaaactaaggtcaatgttgaaccatatcttgatttcagaatttaaaatgtgttaccttagaaataatgaaatatagtgtaacagttggtttttaaatgtggttttatttcaggggccattatttaacctgtgtgtatgctatgatggagttcttttgtgatttctttacttctaaatttaaatagtaattatgtttaaaaacaaatgtttttgtctttagttgcaaagcagcatatatctcatttccttcaaccttgcctcctcatacacaaatatattttcatttcttaaaagatcactgggccagtagttcaaaataatcctccaattttaatttaggaacaaagctttgtcctactgactaggaagtaaacaaacagctgatatataagatatttgtgggtattggtgtcttttttccctatggaatagacacatagttcccttaaatattattaatagacattctacagtctttcagtgtaagtttaaaagcaagagatcaaatgaaaatgtgtactatgtacctatgatgtgtcatatcgtgattacatcatgcagagagaacagttcctataattcaagtaattaaaatttcaagttgtaaaaatgttaccattttcacattggaagcccttctaagtaccattttcattgggggcagggagaaggtttatatttaaattttatattaccagacataaaagtacagtgcagtactgatgattttgtttaaagtttttgtaatgttttgtttactaagttcttgtaatcattattttagacaagcttgaaaacttgaaattgttgaaacttataatttaaattaaattggaaattactttcagaatttggtagtatacaagatgtgcccctttgtctaaataaatgttggcttaatttgcagaatagataaaacaattgatgtttttgtgtgttcaagaatgcattaaattcttttaatagtaaaaagtcaaattacgaccataatgagtattttaatcttgttcttgttcagtactttgtgtagatttttattgtaattgtcctgagttctacagtatgtgaacaatatcgtgtgaagtgtgtttttgcatttgtgcatttaaattatttatgtaactagggctgtgagtaacactttttttttttttttttttttggttaaagaaaagctatatttaaatattcaaataattatatatttccatgtaaaactaatgtgaagactaatgtatttttatattgcagtgtaaaagctaaacttgtttttgatgttatcaagataaaatttattaaaccttg

SEQ ID NO: 18828 - protein, 110 aa, Homo sapiens
MKSWWLNMKIQVILWPYPLKYFRHYHISFYFYVYLLLLFFETESHCLAQAGVQWPELSSPQPPPPGFKQFSCLSLSSSWDYRRAPPCPANFCIFSRVGGFTMLARLVSNS

SEQ ID NO: 18829 - DNA, 2319 bp, Homo sapiens
  CDS (443)..(2317)
aagtaggcggagaaagcagaggaggaccggcgggccaagctttcctagcctgacagcagccatttcggaacgtacgtcccagccctctttagctacttagcgcctctgggcccgagaacacctgctccttggctcagtctggcgccaccggcatcacggaactgtacttcccagagacgtcacaccgggagacttccgattcccgctcttgagattggactctcacgtgcaggagccagtcctcgctgggctctagcgggcttctgatggaggagctactcctctgggaggacagaaattagcagcagcctctgtcaccatccaaagattacaacccatgaaaccattgaatttgtgccttgtatcagaaagcaaaggagaatgaaaaagcacagctaacattgcttgaggatctaggcgattaattctttagactgtcatcatgggtatccgaggactaatgagttttgtggaagatcatagtaatgaattcttcactgatttgaagttgcgggacacaaaaattgtcattgatggttatgctcttttccaccgtctttgcttcagttcaaacttggatctccggtatggaggggactatgattcttttgcagatgttgtacaaaaattctttgaatcactgtttgcttgtaatatatgcccatatgttgtattagatggaggatgtgacatttcagataaaaagcttacaactttaaaggatagagctagagagaagatccagatggcccattccctttctgttggtgggagtgggtacgtatgtcccttactcatccgggaagtattcatacaggttttgatcaagctgcgggtgtgttttgtccagtgcttttcagaagcagatcgggacattatgacacttgctaaccattggaattgccctgtgttatcatcagatagtgacttttgcatttttgacctgaaaactgggttttgcccattgaatagctttcagtggagaaatatgaacactattaagggcacacaaaactatatccctgccaaatgcttttcccttgatgcattctgccatcacttcagcaatatgaataaagctctactacctctctttgcggtgctatgtggaaatgaccatgttaatctacccatcatggagacattcttaagtaaagcgcgtcttcctcttggagctaccagttctaaagggaggagacaccaccgaatcctgggacttctgaattggttgtctcattttgccaaccctaccgaagcactagataatgttctgaaatacctcccaaaaaaggatcgagaaaatgttaaggaacttctctgctgttccatggaagaataccaacagtcccaggtgaagctacaggacttcttccagtgtggtacttatgtctgtccagatgccttgaatcttggtttaccagaatgggtattagtggctttagctaaaggccagctatctcctttcatcagtgatgctttggtcctaagacggaccattcttcccacacaggtggaaaacatgcagcaaccaaatgcccacagaatatctcagcccatcaggcaaatcatctatgggcttcttttaaatgcctcaccacatctggacaagacatcctggaatgcattgcctcctcagcctctagctttcagtgaagtggaaaggattaataaaaatatcagaacctcaatcattgatgcagtagaactggccaaggatcattctgacttaagcagattgactgagctctccttgaggaggcggcagatgcttctgttagaaaccctgaaggtgaaacagaccattctggagccaatccctacttcactgaagttgcccattgctgtcagttgctactggttgcagcacaccgagaccaaagcaaagctacatcatctacaatccttactgctcacaatgctagtggggcccttgattgccataatcaacagccctggtaaggaagagctgcaggaagatggtgctaagatgttgtatgcagagttccaaagagtgaaggcgcagacacggctgggcacaagactggacttagacacagctcacatcttctgtcagtggcagtcctgtctccagatggggatgtatctcaaccagctgctgtccactcctctcccagagccagacctaactcgactgtacagtggaagcctggtgcacggactatgccagcaactgctagcatcgacctctgtagaaagtctcctgagcatatgtcctgaggctaagcaactttatgaatatctattcaatgccacaaggtcatatgcccccgctgaaatattcctaccaaaaggtagatc

SEQ ID NO: 18830 - protein, 625 aa, Homo sapiens
MGIRGLMSFVEDHSNEFFTDLKLRDTKIVIDGYALFHRLCFSSNLDLRYGGDYDSFADVVQKFFESLFACNICPYVVLDGGCDISDKKLTTLKDRAREKIQMAHSLSVGGSGYVCPLLIREVFIQVLIKLRVCFVQCFSEADRDIMTLANHWNCPVLSSDSDFCIFDLKTGFCPLNSFQWRNMNTIKGTQNYIPAKCFSLDAFCHHFSNMNKALLPLFAVLCGNDHVNLPIMETFLSKARLPLGATSSKGRRHHRILGLLNWLSHFANPTEALDNVLKYLPKKDRENVKELLCCSMEEYQQSQVKLQDFFQCGTYVCPDALNLGLPEWVLVALAKGQLSPFISDALVLRRTILPTQVENMQQPNAHRISQPIRQIIYGLLLNASPHLDKTSWNALPPQPLAFSEVERINKNIRTSIIDAVELAKDHSDLSRLTELSLRRRQMLLLETLKVKQTILEPIPTSLKLPIAVSCYWLQHTETKAKLHHLQSLLLTMLVGPLIAIINSPGKEELQEDGAKMLYAEFQRVKAQTRLGTRLDLDTAHIFCQWQSCLQMGMYLNQLLSTPLPEPDLTRLYSGSLVHGLCQQLLASTSVESLLSICPEAKQLYEYLFNATRSYAPAEIFLPKGR

SEQ ID NO: 18831 - DNA, 2025 bp, Homo sapiens
  CDS (41)..(1159)
agtgcgtgagtttggtggcggccggctgtgcagagacgccatgtaccggctcctgtcagcagtgactgcccgggctgccgcccccgggggcttggcctcaagctgcggacgacgcggggtccatcagcgcgccgggctgccgcctctcggccacggctgggtcgggggcctcgggctggggctggggctggcgctcggggtgaagctggcaggtgggctgagtggcgcggccccggcgcagtcccccgcggcccccgaccctgaggcgtcgcctctggccgagccgccacaggagcagtccctcgccccgtggtctccgcagaccccggcgccgccctgctccaggtgcttcgccagagccatcgagagcagccgcgacctgctgcacaggatcaaggatgaggtgggcgcaccgggcatagtggttggagtttctgtagatggaaaagaagtctggtcagaaggtttaggttatgctgatgttgagaaccgtgtaccatgtaaaccagagacagttatgcgaattgctagcatcagcaaaagtctcaccatggttgctcttgccaaattgtgggaagcggggaaactggatcttgatattccagtacaacattatgttcccgaattcccagaaaaagaatatgaaggtgaaaaggtttctgtcacaacaagattactgatttcccatttaagtggaattcgtcattatgaaaaggacataaaaaaggtgaaagaagagaaagcttataaagccttgaagatgatgaaagagaatgttgcatttgagcaagaaaaagaaggcaaaagtaatgaaaagaatgattttactaaatttaaaacagagcaggagaatgaagccaaatgccggaattcaaaacctggcaagaaaaagaatgattttgaacaaggcgaattatatttgagagaaaagtttgaaaattcaattgaatccctaagattatttaaaaatgatcctttgttcttcaaacctggtagtcagtttttgtattcaacttttggctataccctactggcagccatagtagagagagcttcaggatgtaaatatttggactatatgcagaaaatattccatgacttggatatgctgacgactgtgcaggaagaaaacgagccagtgatttacaatagagcaaggtaaatgaataccttctgctgtgtctagctatatcgcatcttaacactattttattaattaaaagtcaaattttctttgtttccattccaaaatcaacctgccacattttgggagcttttctacatgtctgttttctcatctgtaaagtgaaggaagtaaaacatgtttataaagtacactaagaccctttgatgaaagatagcaataatattaataattcaaacatgaataactaaaccaaaattgcacccaccatgagcatctgtaatttgctctttaaccattccttttttaggttttaactaatactttgtttacgtgttattagtttttaattgttttcatactgttttgaaataattttatacttatagaaaagttgcaagagtagtacaaaggattcacatatcctctttactcagattcccttaatgttagtttaccgcatttgcattacctttctgtctacatatgtgtttgtttctgaaccatttggaaataagttgtagacgtgatacccctttacctataaatatttacatgtgtattttctaaaaacaaggacattcagggccgggtgcagtggctcacgcctgtaatcccaacactttggaaggccgaggtgggtggatcacctgaggtcaggagttcaagaccagcctggccaatgtggtgaaatcaaccctctctctactaaaaatgcaaaaattagccaggtgtggtggcgggtgcctataatcccagccacgcgggaggctgaggcaggagaatcgcttgaacccaggaggtggagttgcagtaagccaagatcgtgcccctgcacttcaggctgggcgaaagagtgagactccatgtcaaaaaaggat

SEQ ID NO: 18832 - protein, 373 aa, Homo sapiens [sequence omitted]

SEQ ID NO: 18833 - DNA, 1469 bp, Homo sapiens
  CDS (76)..(846)
agacgctggtagctcctggccagctcaaggtgtttccttttgcctggtaaccaggaggagtggctgaggcagggcatggagcggagcaacgcagctacaaagtgcggagaggagccccgctctggatcccgccggctccccaaggctgaaggagacaagtctggatccgcaggagcccccagtaagaacagcagccgcctggggggccgaccatgtatgtgtacagctggccgccgcccaaacagggcgtctggccgccgccgccgcagctgctcacctgcacctacctggccgcccctctgctgctacccccagtccaggcccacagcttccgcagccggcccgggagcctgcatgcgggcgagtgggcggccccacgggaataccaccgcttctacggccccgccgcgccacccgaggccgcgccgccctggtgggcctgccctccggcctacgccacgaccctgcgccggccctgcgccgccgccggcatctcgggactgtcgctgcaggcgcccgcggcggtggccgagagctgggcgccgtggccggagggcgggagcctgcaaaccgagctgcgctggggccgcgtggagcgcgcgcggggcccccctctgcagctaccggacttcgtgcgccgggagctgcggcgcgcgtacggcacctacccccgcgccgacgtgcgcgtcacccagcgccgcggccagttcctgctgcaggcgacgccgcgcgtgctcgagcccgaccaccgcgtggagtggcgcgtgcggcgccggcccgacagcggcgacagcagcccagcccgggaagccgcggagcgcggccgccccaggaagagcaagggcctgagctgaagccgccgcaaggcctaggggcgggcccgcgtgcacgcgcttggctctttcctgtgtgtgccgccgccgacaggcagaagtgagccctcacctgtgcgcgggaggcggacgcgctgctcacctgtctttttggcttctcccatgactgccggccagtttcctgcacttgtttctctcgctttattgctggacggtgggagaagggcaagtgcaagacggaatcgagggcacctctgggtgttctgtacctcttttcttcttgcaccttgggaagtggaggacgtgggatggaagaagggcctggacctccctccttcctcctccccaccttctcctaaggagcttgccctgcagtaagccccaactttcccttcctcttttccctctatcagagtcgtcgcccacccccctttcccaccgctcccctacccccgccttcctgccaagccgagggcgacggagatccccagcttagtaagaaaagtaaataggccgggcgcggtagctcacgcctggaatcccagcactgtgggaggccgaggcgggcggatcgcttgagcccaggagaccaggttggagaccagcctaggcaacatggcgaaaccctgtctctac

SEQ ID NO: 18834 - protein, 257 aa, Homo sapiens
MERSNAATKCGEEPRSGSRRLPKAEGDKSGSAGAPSKNSSRLGGRPCMCTAGRRPNRASGRRRRSCSPAPTWPPLCCYPQSRPTASAAGPGACMRASGRPHGNTTASTAPPRHPRPRRPGGPALRPTPRPCAGPAPPPASRDCRCRRPRRWPRAGRRGRRAGACKPSCAGAAWSARGAPLCSYRTSCAGSCGARTAPTPAPTCASPSAAASSCCRRRRACSSPTTAWSGACGAGPTAATAAQPGKPRSAAAPGRARA

SEQ ID NO: 18835 - DNA, 2303 bp, Homo sapiens
  CDS (442)..(819)
aaaaattactatgaagtacttggagttacgaaagatgctggtgatgaagatttgaaaaaagcttatagaaagcttgctttgaagtttcatccagacaaaaaccatgcacttggagcaacagatgcttttaaaaagattggaaatgcttatgctgttttaagtaatccagaaaagcgaaaacagtatgacctcacgggcaatgaagaacaagcatgtaaccaccaaaacaatggcagatttaatttccattgaggttgtgaagctgatataactccagaagacttgtttaatatattttttgggggtggatttccttcaggtagtgtacattctttttcaaatggaagagctggttatagccaacaacatcagcatcgacatagtggacatgaaagagaagaggaaagaggagatggaggtttttctgtgtttatccagctgatgcccataattgtattgatcctcgtgtcattattaagccagttgatggtctctaatcctccttattccttatatcccagatctggaactgggcaaactattaaaatgcaaacagaaaacttgggtgttgtttattatgtcaacaaggacttcaaaaatgaatataaaggaatgttattacaaaaggtagaaaagagtgtggaggaagattatgtgactaatattcgaaataactgctggaaagaaagacaacaaaaaacagatatgcagtatgcagcaaaagtataccgtgatgatcgactccgaaggaaggcagatgccttgagcatggacaactgtaaagaattagagcggcttaccagtctttataaaggaggatgaactggaatttttatttataccttttagcgtactctttattttttctgtaagtaagtttggtttcatcatgagggatgaaggaaaagatttgatactgaaaactaaactgaatagttggttcctgaaatcttggactgtttatgacctactggctcctttaaatagtaactgaaaactaaaatggaatattttagttaacgcttctacaagtattttcattttaaaagcttacatgattcctaactaaagtgtcatgagaaaggattatcacacctgtagcaatttccagttttagtgattctccattttttcccttgtcatgtaaatatttatggaatgatcattttgtgtacatacaggttactgcttttttatttaaattcttttagtgtttagctccatgagacacttcagtttaaattgatggaataaatgttatatgacacatttacattttccttatcaaggtgtcaaatatgtggactttaaacaatgaaactttttcagaaagaaaaaacaaaaactttaactttgtgtaaaatcttatagtattatcagcttagagggaattgatatttttaatattgccgttatattccaaaatatatattgagataaatgaactggtgtagaatatcagtttgctatttagttttatgaattactatacatatacatgcatagaaatgaaatgctatactgataaattttaaagaaaatatgaggaaatggctataaatattaaactaaaagggtcttcaacagtaaagtgcagttatgtcatttaaaattccaatactttaaaggccaccaaattttgatgtatatgtccttgaagggctgctaaaatttatgaagaggactcacattttcccccatagaaatttgcagtttcttggtgatcatttaagcaggatccaaagaagttcctttacaaataagtaataagaaaaatgagtactaaaatacagctttgtgccttttaaccctatgccaactcctaaacatataagtagattacagtatacttatctgatcagagcatgatctgtttggccacatgcaagtgtgagcagaaatagagcagcacgtagaatagtaacttaaagcaagtcatcctttaaaaattctgagctaaaatctatttaccattgagtaattgaattaatcccataggaataagctccttgtaagtaaatccatgatatgaattagaaaaaaaaaacagctggaaattgaagtttttgatgcctgtatactggatatgaaactatttgatttctagtcttctgtgtttagcagttgtaatattttaatgattttgcttcatactcggttaatggaacataaacatatctttgatacttctttgtgagtgagagaatgctagatagggtggctttgttctttgtttaagttttttttcctgaatgtagttaatttatggcatctgttgaataaaactgctaaaatgacctctt

SEQ ID NO: 18836 - protein, 126 aa, Homo sapiens; identical to SEQ ID NO: 18055

SEQ ID NO: 18837 - DNA, 2597 bp, Homo sapiens
tttgtttgtcaaattccaagcatatgtcttaaaaggcatttttgactatcacctccaagggaatagcttgagaaacccaaagtactatgctgcagtcgggggagaggtggattgcagcagtatcctcaactacctcttctcactgtcagtgacaccatcttggaatacctttgggaagcagcaggaaatgtgcatgtgggtagagatcaaaggaggcaatggctccaagccttgccatagggctgcctccaaggacacagaaggatgccagttgccacaggtccctgccctgtgtcacctgtctgcccttcattaaggtgagaaatctgcagatagcatcattaagatcagttttaaggggtatagggagggtgagggaagtggggggtgttaggtaagggttgggggtagaggttttgggatgtcttagttagaaaccagattaatagaagagtaggcctgatatattacatcatgagccatagtggtgggaaagaactttagcaatatagccctacctcctcattttagtgatgaggaatctgagaactggagaggctcagtgactttttgaaagtcatacaacacagctaaccattatgccaatcaccatgcttattttgggaaactctttatcttttttaaattccattttatgaaaaggcatcttcatggtccagggaatatgtatcttgtaaaatgtacctggttggagtagcttgtccagtcttgacaaactactgaatttctgtcttgcctctccttcagtgccttttaaaaggttttcccttttctgatctgcatttcaacatagagtcacataaatgtccccctgagaaaccaatcccacttctttctaggagattgggtatcttagataatcttttggggttcctctgtgagtataggaatggtatccttcctaattatcttccaaaggaattattttgtgtgtgtgcctgtgtgtgtgtagagacataaaggagggtgatgtgattttcagctagtcctttcacattttcaataatgaggtaatcatgttacatacacattagtcctcagttataaagtgaatctcagatagaaattaaaagtgcagttgtgttaagactctttcatactaccctttagtcataaggagaaaaaaacactcaaatagtagaagcagcaagtagcaaacttcaggagagctactttctatccaaataatttaaaaaacacttttcacctactcctttcatggttataacacattggcagactttttgctggctctgggagccatgattttaatcacattctgcaaggtgacaaatgtcatacattccacattgtgtggtagccatctctttagactcatgtgttttggggaaaggaagaagttcttggctgggtactattttgaactttccagaaccctctcacaccagagacagttcttctctgttcagtttccaatccccgataatttgctaaaataacattgtacatccaagagagggaagaagagtatgtcagtatattatgcagaagatagatacagccttttcagaagatctccactagtttttgttccaaaaattcaagtttatgggagaaatctcaatagccaccttttcacagttgtgtggatataacatttgggggatctttctggactcctacctatctgtgcattttaccggcacctcaggaaaggagggtgaccaggttgtcttagcttgtactgcttggtgatctctgaggaccttctaattcagttgtaccccagtgttccatgtatagaaaaacttcattagaacaaactttacttgatatgaaactcctattaacagtctttttttgaaataaaaagtagcttgagctttcttttaaaatcatgtatcttgattgttgatttaatgaaggatttccttttaatgctgcttttgagcttcaaggtaataggacagcaggaacctaaaatatctgccatcatctgccataggaaagatacccagagacccatcatgttctctttttgttgttacactgttgggtgggtataacaattggaaaatgaacaaactgattgattgtgcaaactactttttatgacaagcctaaaccctcataatgcggcagcttaaagtgtatacatatgcactaactttgatcaattatattctcatatctgttagctacacagtctcctattatctcaattgcttatgtgcatatggaatatgttacttaaaacgtgtgcattcttactgaaaatgttttcaaaggaaggtatcagctgtgggctaattgccaccaatttcagcctgccacgattcttggaaatatgtcttccaagtgccatccatcatcagtaggacaagtgtcgggagtttgtttatttttttccagtagcaacgatgggttacatggagccatgaaacctccttctggcctcccttgtgattaatggcatgtgtttgtaaaatggatagctggggttggcagatggctagagaagaatcgcctttggtttaaaatgtatgtggtcccctaatgattgtgaccccattctgtaatcaactgagctagttccaataaagttaagcaggttt

SEQ ID NO: 18838 - DNA, 1968 bp, Homo sapiens
cagcagaaggcaaagggaaagcaagcccatcttacatggcaggagcaagaggaagagagcaaagggggaggggttacacacttttctttccttttttttttttaagatggagtctcactgtcacccaggctggagtgcagtgatgagatctcagctcactgcaacctctgcctcccgagttcaagcgattcttctgcctcagcctcccaagtagctgggactacaggcatgtgccactatacccgggtaatttttgtattttcagtagatacaaagttttctcatattggccaagctggtctggaactcctgacttcaggtgcctcagcctcccaaagtgctgggattacaggcaagagccaccttgctcggctggggttacacacttttaaacaaccagatctcgtgagaactcagtcatgaggcagtactagggggatggtgcttaaccacctatgatgcaatcacctcccaccaggccccacctccaacactggggattacaattcaacatgggatttgggtggagacacagagccaaaccgtatcagtcatttttcttttactgaaggaaaattttggttgtggggttagtactaaagatagcccatgtagactttttctgaagataccccaagtggagagatttttaattaggcatttatttggcacctattgcattctaggcattgtgataggagctgggggataaaaaggtgacacagattgggtccctcttatggactcgttttttgtctcagaagacaagtctgggtgagaaagaaatttaaaatttaagttgtggaaataacacgtgtgggggaaactccttgcaattcagcacagtttggtattcagccccagcctcaacatgcagatggcactgttggatgaagccacaccatcttttttcctgggagccccacactcttcccagcctgccttctagctcagggacaacacattttgaaaaacaaagtataaatcgattatgttgcaacaatgaacttcacgttttgcctcttctcatgttaaaagagccagtatcatgaaagcctcaacagtgagctttatgaatcaaatatctgttatttctaaacaatctgtttacattatgaccaaataattagagcctatctagacttaccaaaataagatagggcataagcgatttattggtgcatcagcctttgtttgctttttaaggttcctttatgttttaaagggatttgaacaaaagacatcaggagcttacaaaggaaaaatagcttcattttggttatgagataccagagtcagaaatgacattagattgtatagaaaagacttctaattgtgtgcttacttcccacatgattataataaactatatattaacaaccttgggatcgtactcaggttgtcaattacacggatgcatctttcacttttttctttcccaagagtgagagaaagagtgaggttgtgcttaaggcagtgtggaattctacagaagctcttcttggaaaaggagttcaggcacttgtgttgtagactgcagtctgattctgttcttacttcctctcagcataagggagctttgaaaagaaaactcagacttgtatccgacttgaccagaagcaaaataacttgatcattgaagccactatttctgtgtatttgatcaagtcctcctctggaatccaatgcagccatattcatatttcggtctctcttaatggaccttgctggaaagaacattctgtgctaagaaaatggaaaataaacgtgagaaaactttaagaatgagccttcacacctcctgcagcaggtgatagctctgtacttcagagcttgtctccaggttgagaattacctgttttccactctgaggggattagaaagatactgttttaatgggttataaaacttgtgtgaagaagattggccttctccacctctcctgtgaaataaattgtttgaaaactc

SEQ ID NO: 18839 - DNA, 1983 bp, Homo sapiens
  CDS (728)..(1090)
tatataactagaacccccctgggctgtatttttggtcaaaggagtctccaaggcggcttacaaaagcttcctttttcacttgaccacccttgctcattggttacttgtgaagggaattggtcagtttccacctcagcactttgccttatcaacatgcggtcgccatctagtggccaaaggttgtctccaccagctacccagatggaaggcaaataaatcctttcggccaccctgctgtccatcgtgaactttgggaatgaaatataatggcctgaacgaactgcctttgtgttcagagatcagtgcaacactagggtcagaagactccagaagcagccacttagtagactctcacgcagaactgagaaatgcactagctgtcctgtgggcagaagagacaggagtggaccaggagaggtccaggtgcccgggaagggtttactgtaactgcaatactggcagcccagctgctgaccttgttaagtaaacctttgctgggtggtccgaattctgccctcaaggcaagataagaagttgggtgtaaggattttgtggggggcctggccatgatctttgatatgatccccgaatagccaaatagttttttttgttcaattttttgtttctgtattttgtatttttaaaatcttgtcaaatgtttttgtgttaggaataaaaagtcataaactattcccaactttgtttcttgagggatgttctgattccaatggaaacaggtgggaaatctcaaggggagcgtggacaaggtggtatgtgcagcaggggaatagactgcttggatttccaaatggtttctggggaagatgaccatccagaagtccagcttagtgcagtctgctctggaattcacacccaccccctcgcctccttgtgccatgttgttagcattggcttggagcatctgcttcttccagaggcagctgctaatgttgaaaccaacacgagccctctccccaaccccaggtttctaaagaaggtgtctgtagccagccttaatcaactgggcaaggtggtccctatggtcctttccagcatttccaaattggactcaaattattttctcttggtgtgaccacacagcctagagaattctgagcaataggagccagggctttccctgactctgcgacagggtcaaaccaaggaatggctaaacctgtgaggttttgtcatccccgggggtactactgtagggggcattatttattaggaagcttaacaaggtaactacggcctgagtgcgtgagtgtaaggctgtgtttgtggtgggggtgtgtgtgtgtgtatctgtgcacacatacacacgtctgtgcctgtgtgtgtgtgtttgtgtgtgtgtgtgtgtgtggaattacattgatgcatttattgagaaaggtgcaagaatttcacctacacagagggacacatctgctttgttatttataatagaaagctaaattttaattttttaaaggacactgctaatgattgagaatcaagtttttagttttgctattttttttaattggtagaggatttttatatattttttccattttgttgggttgtgtccttatttatataaatactttatccgtaagaggcaaggaggaaaccttctttgcttttaattattgtggttgtcatcgtccctattttatttctggtgtgatttctctgtcttaccttctaaatgagaaaatgttttcttgtatttgtacattgtcagattctatagtttcctagataatttaaccaaattgctctatgtattattattctgtgagtataaagttctattttaatgtctgtaaatacttcagaactggcttcttttctcaaactcccactgtggggttattgtttacatcacagaaactgtagaatctctatgctcatgtactgtaaatagtgaagtgatctgcttataaataaacttaacaaatacactatggagattaaaaacaaaataccacccac

SEQ ID NO: 18840 - protein, 121 aa, Homo sapiens
METGGKSQGERGQGGMCSRGIDCLDFQMVSGEDDHPEVQLSAVCSGIHTHPLASLCHVVSIGLEHLLLPEAAANVETNTSPLPNPRFLKKVSVASLNQLGKVVPMVLSSISKLDSNYFLLV

SEQ ID NO: 18841 - DNA, 1984 bp, Homo sapiens
ttgcttttgggtttttttttcctgtttccacccctccccgttattttttcctttggatggttaaaagcattgcaggcacccgggaaggtgagcagagggtaggtgggtgggcttgtcccctccccggtcccccgccctgctcacctctactatgaaggtgcccccaggtcacctgtgctgcccgccatctgcccacgtggcttgcagtgactcaggagagcaggcccacagcgtttgccatcttgcagagctggggaggggcacaggaccctgccctcgtgttccctcccagcccgcagtatttcagggacaggctcttcccctctatccctcaccctgagagcacccctggtggcttggttggggaagggaggggctgcctgtctctggaggtgtcaggcaggcaggtggcaggcagctcacccacccaccccatgggatcccccagcccttcacccgcgcctgccttgtccccatgatagttgacaatcggggcttcctgcaaggcccgtctgtctgtccaggactcctggtggccagattcggcctccgaccttgaccttaaactgcagctgaccccaggggctcgccgctgcccctcccctccacaccaaggcctgagacagcaggagccctgcctagcccgaagccgtttccaccgcagcaggcagaggggctggacaggcactgtcagccaatgtggggggtcctgaagacacccccttggggcacccgagtgccccttctcagggctcagtctgaccgtagccacgtcctgcctcgcgccgcccctcgggcctgacctggaagctccgtcagctccgtccttgtccttagagctgagcccagaccccggggtctggccgaatcctcacccccagggcagtgtttttggtctgccaccttcaggaaaacggctgcggcctcggcctcccttcgggcacccaggaatgcgggggtctgctcagtccccccaccctccatgctccaacccccgggggctgcggagcctgctgccccctccccgcgggtggggacgttctatgcaatacagggttccactttagaagtgcgcgcggctagggtcaccgcccgcccttcccggcgcagcccccgagctccacagctggggcagcccctctggcttctaaatccgcggtcgggattcttcctcctgtttagttttttagtttttccttaaaaaaaaacaacacatcgatggactttgcttccctgttcttgaagaatacttgaatgtcggggggcctgggggtgggggcctcggagaccgtctgcctggctctgctgcccctcctgaatctcgtatgatggtcacagtccggtggccgtgggggtgctctgccttccctggtccccactgcccatatctgtggactgccccttccaaagacccctggggggggtggggcattccgcccacccctttcccccatcacttctcgcctgtcagtgattccatgtttcgtaacgggggattctctgcctttttgtatcaaagaacaagcaaatggacccccgcccgctgcaggcgcccatagccatcgggtctctaaagctgagtggctagcagcgtttgtttgtttgtttttttttttttttctgaaggtgggacagtcacttcctcctccctccccacccctgtcgcatccacgtgcgacctggaggactggtcagaaccgttactgtgaatgagtgaagatcctggaggaccctgggccccaggccagctcccatcgctgggggacggtgaacggccatgtgttaatgttacgatgtttttaaaagacaaaaaaaaaaaaaaacctcaaaagtttttttaaagtgggggaaaaacatccaagcactttaattccaatgtaccaggtgaactgacggagctcagaagttttcctttacaccaactgtcaatgccggaattttgtattctgttttgtaaagatttaataaaagtcaaaaaacttgc

SEQ ID NO: 18842 - DNA, 2845 bp, Homo sapiens
  CDS (452)..(2644)
aaaaattctagagcaacctcatgcagttctctttgttgatgaaaaggatgttgtagagataaatgaaaagttcacagagttacttttggcaattaccaattgtgaggagaggttcagcctgtttaaaaacagaaacagactaagtaaaggcctccaaatagacgtgggctgtcctgtgaaagtacagctgagatctggggaagaaaaatttcctggagttgtacgcttcagaggacccctgttagcagagaggacagtctccggaatattctttggagttgaattgctggaagaaggtcgtggtcaaggtttcactgacggggtgtaccaagggaaacagctttttcagtgtgatgaagattgtggcgtgtttgttgcattggacaagctagaactcatagaagatgatgacactgcattggaaagtgattacgcaggtcctggggacacaatgcaggtcgaacttcctcctttggaaataaactccagagtttctttgaaggttggagaaacaatagaatctggaacagttatattctgtgatgttttgccaggaaaagaaagcttaggatattttgttggtgtggacatggataaccctattggcaactgggatggaagatttgatggagtgcagctttgtagttttgcgtgtgttgaaagtacaattctattgcacatcaatgatatcatcccagagagtgtgacgcaggaaaggaggcctcccaaacttgcctttatgtcaagaggtgttggggacaaaggttcatccagtcataataaaccaaaggctacaggatctacctcagaccctggaaatagaaacagatctgaattattttataccttaaatgggtcttctgttgactcacaaccacaatccaaatcaaaaaatacatggtacattgatgaagttgcagaagaccctgcaaaatctcttacagagatatctacagactttgaccgttcttcaccaccactccagcctcctcctgtgaactcactgaccaccgagaacagattccactctttaccattcagtctcaccaagatgcccaataccaatggaagtattggccacagtccactttctctgtcagcccagtctgtaatggaagagctaaacactgcacccgtccaagagagtccacccttggccatgcctcctgggaactcacatggtctagaagtgggctcattggctgaagttaaggagaaccctcctttctatggggtaatccgttggatcggtcagccaccaggactgaatgaagtgctcgctggactggaactggaagatgagtgtgcaggctgtacggatggaaccttcagaggcactcggtatttcacctgtgccctgaagaaggcgctgtttgtgaaactgaagagctgcaggcctgactctaggtttgcatcattgcagccggtttccaatcagattgagcgctgtaactctttagcatttggaggctacttaagtgaagtagtagaagaaaatactccaccaaaaatggaaaaagaaggcttggagataatgattgggaagaagaaaggcatccagggtcattacaattcttgttacttagactcaaccttattctgcttatttgcttttagttctgttctggacactgtgttacttggacccaaagaaaagaacgatgtagaatattatagtgaaacccaagagctactgaggacagaaattgttaatcctctgagaatatatggatatgtgtgtgccacaaaaattatgaaactgaggaaaatacttgaaaaggtggaggctgcatcaggatttacctctgaagaaaaagatcctgaggaattcttgaatattctgtttcatcatattttaagggtagaacctttgctaaaaataagatcagcaggtcaaaaggtacaagattgttacttctatcaaatttttatggaaaaaaatgagaaagttggcgttcccacaattcagcagttgttagaatggtcttttatcaacagtaacctgaaatttgcagaggcaccatcatgtctgattattcagatgcctcgatttggaaaagactttaaactatttaaaaaaatttttccttctctggaattaaatataacagatttacttgaagacactcccagacagtgccggatatgtggagggcttgcaatgtatgagtgtagagaatgctacgacgatccggacatctcagctggaaaaatcaagcagttttgtaaaacctgcaacactcaagtccaccttcatccgaagaggctgaatcataaatataacccagtgtcacttcccaaagacttacccgactgggactggagacacggctgcatcccttgccagaatatggagttatttgctgttctctgcatagaaacaagccactatgttgcttttgtgaagtatgggaaggacgattctgcctggctcttctttgacagcatggccgatcgggatggtggtcagaatggcttcaacattcctcaagtcaccccatgcccagaagtaggagagtacttgaagatgtctctggaagacctgcattccttggactccaggagaatccaaggctgtgcacgaagactgctttgtgatgcatatatgtgcatgtaccagagtccaacaatgagtttgtacaaataactggggtcatcgggaaaggcaaagaaactgaaggcagagtcctaacgttgcatcttattcgagctggcagttctgttcacgtccattgccggcaatggatgtctttgtggtgatgatccttcagaaaaggatgcctctgtttaaaaacaaattgcttttgtgtccctgaagtatttaataagaagcattttgcactct

SEQ ID NO: 18843 - protein, 731 aa, Homo sapiens [sequence omitted]

SEQ ID NO: 18844 - DNA, 2553 bp, Homo sapiens
aacaagagttatttttaaacagaactcctcttaccccccaaaacagataaacctcagtgtacaattttgaaagaagttttgccttgtaatgagtaataatttagaaagtagacagtggttgtgtttggctctcgttttattccttttacatttgttgcttctgggatttaaaaaattactaaattcataagatagttaggtattaaacacttcagaatatcaatgtaaaattggaaaataaggaactgggggcatttgtttaggccatgacttctacaagcagatttcttttcttttagtttagaagacaaaaaatttcaatacagatacttcttttagaagtaaatttttagattttattgtcagtagaaaaaagttaaactcctactaatttaaactaagacagtttaaaaaggaagcctgaaaaagactcatactacaaataatttaattgatggcatataagaatatgcagtttgaaaaagccaaactcttctctccacttagcttttgatccccactgtttgcttatttgtataagtcatactgtgtagaatttctattttctttttccccattaaaagaggaccaaacaattctttatacaaatggagtagcaactagttttgtagcactacatttaatgtaatgagatacctttgttcatttttttaaatttgaaatatactttacctgatccactttgattgtatactatattctttgttaattttaattttgtcctgttcctagactgctagaatctggcccctggccatcttaaagtgccaacatatgcctgcagggtttataaaaaatggcctggagtgacacattttattatacctaatattcactgcatcagtatcacatctagctcccttacttgtccacagataatgtaaacaaaggagggaaaaacttattaaattctccttcgctgctggcttgtgctggtttagtgcctgtgtccctggcagtgtccagtgtgttcacttccagttgaagtatccatgtgtttctgggcagcttttctgctcagtgtgatcctgagatggcttccccgccgccacccagagtgtggtccttggccgcctcctgctcctgctctgcaagcctgaaactggcttgtctggagccaggagttagtcctggggtgtgtgtgtgcctgcgcacccatgcgcatgcaagtgtgtttgccagctcaggagctgtctcctctctacctggctagtaagaggtgggacagtaatggtcctcctgctggccccagcaaggcccatgagtgactgccctgacgtattcactgtgcctctgggccacttcctcccctgtagatgtgggcttgttgccttcagccggcttccctgagggaggagaacactggattattggaaatgttttaatcactcttgccattacctacatctattagcatagatgatgaaaagctgttactggtgattatagatgagtatttccaggacaacattctaaaagtacaattatttcttattggggagattacaggtagtttggcaaagcattgaagtacaaaggtacattttcaattaaaaggcacacttctacaaaagatttggtttttaaattatggttacacatttcagtaactcatagctgctgtgcaaattggtagaccttataagaaggcacttgtttgtaagccagagaagaaactttaattgcatcctatcagattgttgaggtgggtgtgatagtcttcaggtgcagtgcgttcattcactaacgctcactgtcagtgcccatgtttgctagctgcctccatgtgactagtgagctgctggtgaaagtcgtgtgaaatcctgtacactgtgtatagaacaatgtaattttatgttaattgttattactttaaaacatatctaccatctgattggctggtaccgagagctgtgggtaaaatttgagaattgtatttagaataagaaattttacattttaaaccctattgtcctttatgcattttcaatgaaatggaatgaaggctaatatgcttgctttatttacttttgtaatcttggattttgtagcttttaaaactagaaaccattgttctaacaaagcaggcaactttattctataaacacaactttattaagcagaatacactgtagatgcttttccccaacgtatctggctggcagtctttgtcgttgttcactctggggataaaggggaactaggctagcagttctaatgtgacattctttaagcatatcctaaaatagtatttaagtaaatggtctaatttctacataattattgcactgaacttttttgtttattaaggtgtttaaataagctcagctaattcaagacactgtagtcacttgtgcatcagtgtgcttgaatttagtagcttacagcattatttatgaaggaaaaaatacataaatatgaagtacctcatgttgaatgttattgtactgtatttttaatgtaacagtgcagatcttgttagacacatgaatgtgtataatcatgttaaatgcaaataaaactagttcatag

SEQ ID NO: 18845 - DNA, 2616 bp, Homo sapiens
tgcttctggacggaagtggtggctgtggaaggcgtagcatcatcctgcagacagacaataattctggagatactggtggaagttccaagtccaataagacactcaaatatgagtacaaatgccttaaaatggaattgaaaaactctttattttcccctatcatttattggatgggtgggtggggtatttttttgtaattgcttttttaaatattagttaatggattaaatttaattcttcagcgtaaaatggtgaagaactagcatatagccattgatcataaactgactatcataaaatcaaaacaagtgaaataacaaaatggacatggtggctttgtttaggtagagccacaaaagaaaagacttgtaatatttttatatacagaggaaatctgtaacaggtattttgtttcttttaaagcaagcaacacagaggaatttatacctcaaactatctggccatatttactaccttatcactgcattattctcttttatctgtttaaagcatatagagatgaagtttgtagttgttttaagtactacacatttttaaattgttagcttccttaagtatatcatgtaaagaaatgtcttaatttttgaaaaaagtacatatttattttcttttgaattgtttttattgttttctatttatgccttgatgatttaatatggatttgttacagccaagtgccaaatgctctctcaaattgtcagcaatttaactagacacagataataatgggtttctttcagattttttgaaccatccacttacatatatttttaaaaaatgaaatccttttcctgttcatacactaaccaaatctctcaaatctgttatcccaatcattgttgcctctccgtttattataaactgtatgctcacaacttagtgtaatataccagcttgtatgcaatggattttcaaccagataacatacctttcctgctctggtgcttagagactatcaactccctcctttagtgaaggagccgtgttagagcttccgagaatagctccactggagagaagtggaatcctatatagaatgctgcactaattgataacacagcctataggccaatgcatgagtaaaaaaaaaaacaattactggctcactggctttgaaaagtcacttactattgttgctgaaacttgctgagctgtttatagagaatgatgataacagaacttttcctctgtatcactggtgtttaggtgaattaattaaacattgtgatcattagtaccaggtattattatctttaagagtcttccacttcaatgcacatggtgcagttttggtgtgtaacttagaaggattgaacttctttgaatttactggacataacattttcagaatagttggtcatctagcaaccgcctcaaaatgtgtaagcaggagagaaatttctcatcacagggatttagacttactattacataaaggctaactatgagcttgctcattaattttgaaaagatgtacctggtggatatctagctagtaatatattctgaagcaacattttagctctattgatactctttctaatgctgatatgatcttgagtataagaaatgcatatgtcactagaatggataaaataatgctgcaaacttaatgttcttatgcaaaatggaacgctaatgaaacacagcttacaatcgcaaatcaaaactcacaagtgctcatctgttgtagatttagtgtaataagacttagattgtgctccttcggatatgattgtttctcaaatcttggcaatattccttagtcaaatcaggctactagaattctgtattggatatataagagcatgaaatttttaaaaatacacttgtgattataaaattaatcacaaatttcacttatacctgctatcagcagctagaaaacatttttttttttaaatcaagtattttgtgtttggaatgttagaatgagatctgaatgtggtttcaatctaattttttcccagactactattttcttttttaggtactattctgagcatactcaacaaaacccatgcatttcataaactaatagaagttgaggattgttgaatctatttcacttattttggctgtggtttccatctgaaagtagaggttgtatacaccatatactgttcttcattttattaatatttttctccttgacctctcataaatttactttacacaattcttaccctgtacatatgtaaacataagtgtacgattcttaaccatggagtagaggtactagaatgcttacggccatctctttgtacaggaactgcattgactttcagtaaacataaagccacaactcctacatgatgttatgtaccatatgatctgttttgtatcttaaatttgatttacatatattatttatttctggtaactcactcagtttatgctgtgctaaatatcaatcaagccatgtataaatgtgatatgattggcaatatgtgtttactttaaacttgtcttttcaaaatattactcagtttatgttgtacaatgtagatggcctcttactaatgtaaaatgatttgtagtggaaacatttatatttttataataaacataatgaaaatattttttacagattgg

SEQ ID NO: 18846 - DNA, 3917 bp, Homo sapiens
  CDS (855)..(1592)
aagaaaggtaagggccctgggcgaggaaagcgcggccctttccgagtttggtgttttgcagcgaaaggaaatctcgctcttccgaaagtcctccagggcgagagaggaaagggcctaggtactgtgctggggtcgcacagccggccgagacagtgccgggacggggagccaggcttccgagtgcgcccggtcactgactcctccgcgctttcctcgtgcgcctgcagcccttggttcttggaaacgccggcgccttgttcagggctggtggggctggggcgcaaggtgcagctgacaatgcccgagaggagccgcagcctctggtggagttcggtcgggtgtgggggtagtcaaggaaagaagcaaagggaatacctcctctgaaaaatggcagaagcagttttccatgccccaaagaggaaaagaagagtgtatgagacttacgagtctccattgccaatcccttttggtcaggaccatggtcctctgaaagaattcaagatattccgtgctgaaatgattaacaacaatgtgattgtgaggaatgcggaggacattgagcagctctatgggaaaggttattttggaaaaggtattctttcaagaagccgtccaagcttcacaatttcagatcctaaactggttgctaaatggaaagatatgaagacaaacatgcctatcatcacatcaaagaggtatcagcatagtgttgagtgggcagcagagctgatgcgtagacaggggcaggatgagagtacagtgcgcagatcctcaaggattacacgaaaccgcttgagcatcctcctgtgaaaaggaatgaagaggctcaagtgcatgacaagcttaactctggaatggtttccaacatggaaggcacagcagggggagagagaccttctgtggtaaacggggactctggaaagtcaggtggtgtgggtgatccccgtgagccattaggctgcctgcaggagggctctggctgccacccaacaacagagagctttgagaaaagcgtgcgagaggatgcctcacctctgccccatgtctgttgctgcaaacaagatgctctcatcctccagcgtggccttcatcatgaagacggcagccagcacatcggcctcctgcatcctggggacagagggcctgaccatgagtacgtgctggtcgaggaagcggagtgtgccatgagcgagagggaggctgccccaaatgaggaagcctttttcttggtctatgctctgggatgtttaagtatttactatgagaaggagcctttaacgatagtgaagctctggaaagctttcactgtagttcagcccacgttcagaaccacctacatggcctaccattactttcgaagcaagggctgggtgcccaaagtgggactcaagtacgggacagatttactgctatatcggaaaggccctccattttaccatgcaagttattctgtcattatcgagctagttgatgaccattttgaaggctctctccgcaggcctctcagttggaagtccctggctgccttgagcagagtttccgttaatgtctctaaggtaacacaacatcagctttgccattggagtgtcacttaaatggttcagtttttttttttttcttaaatgtagtagaatcaaaaaagttagttgtagaaacttcataacattcctgccagtgacatgctggaagatttggggtcattcgtacccttcccttattgcgctagaagttgtcctcccctcatgttacattttattgtcccctccctcccaactgctgctgagctccaatgacggagctttggagtgtcccatggtgatctgatctgggtaggcattgcttctcttcccaggggtatcgttgctatgtgacttgttttatactgcaatttaacattcactcatacacatattcacaaaggagtcaaaacattgaaagtttgtagatctcttagagaggaagggacttgatatttgttgctaagcactttcccaccctgttgttatcctcatcctgaggatgagaaaccaaggctggagccgttgagtggctaatccaagatcacacagctcatgtgcatactcgggatccaaacccacagctctctggctccctggcttttgtttcactatatccttcgtgttgccatcagagataggagggactcagcttacacaaggactatcaagaaagaaagctgtgtgtgttctcattactcagtgatttgctggctgaaaacaaattgtagataccctctaatttcatcctcatgctgctggaggtgaggtggggctgaggccagagggtcttgcagggctagagatgactgccctttagagcaggttaggttgcctaggctttagcttggtcctatagaaaattagggagcctatactgtttctagaatttttatgcccattttaggggacttgtagcatatacttaatatgtcctcacttaacattgttgatatgttcttggaaactgcaactttaatgtcgtataacaaaaccgttttttcttctcatcatttcaagaaaacaatgttgaagtttatttgaagacctgctgtacatctgtattagtccattctcatgctgctataaagaaatacttgagactgggtaatttataatgaaaagaggtttaattgactcacagttccatgtggctggggaggcctcaggaaacttacaatcatagtggaaggcacctcttcagagggtggcaggagcaagaatgagaggatgagtgaaggaggaagccccttataaaaccatcacatctcatgagaactcactgtcacaagaacagcatggggaccgtcccccataatctaatcacctcccacgaggtccctccatgacacgtggggattgtgggaactacaagatgagatttgggtgggggcacagccaaaccgtatcaacatcatttcacttaaagtccgtgtccaagaacctatcaaggacatttgaggacttactatatttagtattcttaatgctgtgtttataatcaatgtatctgcttatatctgttgccatgttcagtgattactaaacggcaggtacttagtcagaacgtaaatcccagttatggtttccccaggaggaaactgatgtgctctgtgagtttccacttggagtgcacagtgagagggactggagaccacctgcatttcctgctgatgcacccaaatttgtactattattttgtaggatacagaagtggtttttcatttctcaataggaacttatgctgtgctatttgattaaaccctctactatgactgacaaggaaatggagtcaccagaatgtatgaaaaggattaaagttcaggaggtgattctgagtcgatgggtttcttcacgagagaggagtgaccaagacgatctttaacaattcaacctcaaatttctaatttcaccaacaactatttattgagggctagtctcgctctgtcgtccaggctggagtccaatgctgcgatcttggatcactgcaacctctgcctgctgggtttaagcgattctcatgcctcagcctcctgagtggctgggattacaggcacgcaccaccacacacggctaatttttgtatttttggtagagacggggtttcactatgttggccaggctggtctggaactcctgacctcaagtgatctgcccgccttggcctcccaaagtgctgagagtacaggcgtgagccactgcatccagctcttagcatgtgcttttaaagtaaaaaccacgaggagaaggtactcattacttcataacttgtgtctcacccaccttgctgtcttcacatccccactttctgtatgcacattggaaggtgaatttgttcagctcacattaatttataggaataattttcattgctctgtgaataaaatgtgctaccacttt

SEQ ID NO: 18847 - protein, 246 aa, Homo sapiens
MVSNMEGTAGGERPSVVNGDSGKSGGVGDPREPLGCLQEGSGCHPTTESFEKSVREDASPLPHVCCCKQDALILQRGLHHEDGSQHIGLLHPGDRGPDHEYVLVEEAECAMSEREAAPNEEAFFLVYALGCLSIYYEKEPLTIVKLWKAFTVVQPTFRTTYMAYHYFRSKGWVPKVGLKYGTDLLLYRKGPPFYHASYSVIIELVDDHFEGSLRRPLSWKSLAALSRVSVNVSKVTQHQLCHWSVT

SEQ ID NO: 18848 - DNA, 2116 bp, Homo sapiens
tttttttcaaattgtggacatcaaaaatgcagcctcatcattttcaaatgcctgtttaaggaaacatgtttattcagttttaaagcttcataacttgtagccttagagtttgcatctttcctggcatttctccgcactgtggtgtcaaggaaagagcatggctttcatgtcagacacatctgcaatcagatcctggctcagtcaacatgcattattagctcagtgtggctgtgtcagcttacttggctgctcttagccacaggttcttcctcttctaaacctcaggagattggtgaattcagtgaaaaaatgcatgtcaggccaccagcacagcatatggcaaatgacaccctcactaaacagtgatttttccttccctcttattctgcttgatagaattaaattatctttaaggtctgtgagtaatgtctgtttgtgtaattaagataggagtatttttataagattgtaatgacatgaaagaaactttccccattcccatagtgtctttaatttgctttaaaacacttgaattagtgaaaaagccagttatttattcgaatactataattttctcaaagaatgatcaccattttaagattaattccaatgttctttttcatatctaaataatgttggcatactactgacaagagaaacaagacaaatgtgagagatgtctgcgtttctcctattaataatattacaattggatgttagggtgcaggttaaatagcttttctttaattatattacaattgaatgttagggggcaagataaataggttttctctcaggttgataccctcctttaagtgaatgtgattaactgttgtttcatgttaatgagcattaagtcaagccagtaaaactgatctatttatagagcaaggagaaaatgtgtcatgaaatttggaacttaacagagatgtaatttgcttttttgcacagatgttgatgagtgtgcagaaaacataaacctctgtgagaacggacagtgccttaatgtcccgggtgcatatcgctgcgagtgtgagatgggcttcactccagcctcagacagcagatcctgccaaggtgggtcaccaggattccaactcattttcaagttggatcaaccacagtaaatgaaaccacaacaagggctggaacaagctccacctggaagcagaatacatagcacatgctgcactataaaagtcattcgtttaagcgtggattattttgccgaatgaataatgatgatggcggctttcatctcttatgaagttttcctggccaagagccagtagttggaagtttggatcattcttttttcttttttaaccatttcttctcttctttctcttttttatcactaaatgaatgacatgtggagaaactattcagcttttaaagtatgctccattacttgtctcaactaccactatttattgtgtttatcaaaatcataaaaagctcatttttggcatttaccttcgtggttgagactgctgtctgtatgtctgggaatggaagtcctcttcagggattcagcaagggctgtacttttgcttaatactagtggttccttattctaagtgatgacatcatccacctttcctagaaatgggtctttgtgcctagtatgatatctttccaagaaaaagaatttggattttctattaaattagaaactcaattcacattatatatagtttgagccatcattgtgttatgaatagggactatatgaaaatataaatgaagaaaggagagattgaaaataatttatacaccatagggcttcagtagaatttatgattcacagaaaacctttaaaaaaactcagtttgggccaggcgtggtggctcacgcctatattcccagctctttgggaggccgaagcaggtggatcacctgaggttgggagttcaagaccagcctgaacaacatggagaaactccatctctactaaaaatacaaaattagctgggtatggtggctcatgcctgtaatcccagctactcaggaggcagaggcaggaaaattgcttgaaccctggaggcggaggttgcggtgagccaagattgcgccattgcactacagactggacaacaagagcgaaactcagtct

SEQ ID NO: 18849 - DNA, 3207 bp, Homo sapiens
  CDS (1257)..(1595)
ggagatcaacgcagaaggagataatttctgcatttccaactaaagtacccagctcatctcattgggactggttagacagtgggtgcagcccacagaaggcaagcagaagcagggtggggtgtcgcctcacccgggaagcgcaaggggtcagggaactccctcccctagccaagggaagctgtgagggactgtgccgtgaggaacggggcattccggcacagatactatgctttccccacggtctttgcaacccacagaccaggagattcccttgggtgcctgcaccaccagggccctgggtttcaagcaaaaaactgggcagccatttgggcagacactgagctagcagcaggagtttttttcataccctagtagcccctagaatgccagcgagacagaactgttcactcccctggaaaggggcactgaagccagggagccaagtggtctagctcagcagatcccacccccacggagcccaacaagctaagacccactgggttgaaattctcgctgccagcacagcagtctgatgtccacctggaatgcttgagcttggtgcagggaggggcgtctgccattactgaggcttgattaggcagtttccccctcacagtgtaaacaaagctgctgggaagtttgaactgggtggagcccactgcagctcggcaaagttgctgtagcaagagtgtctctctagattcctcctctctgagcagggcatctctgaaacaaaggcagcagccccagtcagggacttatagataaaactcccatctccctgggacagggcacctgggggaaggggcagctgtgggcacagcttcaggacacttaaacgttcctgcctgctggctctgaagagagcagcagatctcccagcacagtgctcaagttctgctaagggacagactgcctcctcaagtgggtccctgacccctgtgcctccggagtgggagagaccttccagcaggggtcaacagacatctggtgggtgcccgtctgagacgaagcttccagaggaaggaacaggcagcaatctgtgctgttctgtagcctgcgctggtgatacccaggtaaacagggtctggagtggatctccaacaaactccagcagacctgcagcagaggggcctgactgttataaggaaaactaacaaacagaaaggaatagcgtcaacatcaacaaaaaggacatccacacaaaaaccccatccgaaggtcaccagcatcaaagaccaaaggtagataaatccatgaagatgaggaaaaaccagtgcaaaaaggctgaaaattccaaaaaccagaacaccttttctcctgcaaaggatcacaactccttgccagcaagagaacaaaactggatggagaatgagtttgacgaatttacagaaggaggcttcagaaggtgggtaataacaaactcctctgagctaaaggagcatgttctaacccaatgcaaggaagctaaaaatgaaaaaaggctggaggaattgctaactagaataaccactttagagaagaacataaatgatctgatggagctgaaaaacacagcacgagaccttcgtgaagcatacagaagtatcaatagctgaatcgatcaagcagaagaaaggatatcagagattgaagatcaacttaatgacataaagtgtgacgtcaagattagagaaaaaaagaatgaaaaggaacgaacaaagcctccaagaaatatgggactatgtgaaaagaccaaacctatgtttaattgatgtacctgaaagtgctggggagaatagaaccaagtttgaaaacactcttaggatattatccaggagaacttccccaacctagcaagacaggccaatattcaaatcagtaaatacagagaacaccacaaagatactcctcgagaagagcaaccccaagacacataatcatcagattcaccaaggatgaaatgaagaaaaaaatgttaagggcagccagagagaaaggtcggtttactcacaaagggaagcccattaaactaatagcagatttgtctgctgaaaccctacaagccagaatagagtggggggccaatatttaacattcttaaagaaaagaattttcagcccagaatttcatatccagccaaactaagcttcattagcaaagaagaaataaaatcctgagagacaagcaaatgctgagcgattttgtcaccaccaggcctgccttacaagagctccagaaggcagcactaaacacataaaggaaaaaccagtaccagccactgcaaaaacataacaaactataaagaccaccgacactatgaagaaactgcatcaactaacaggcaaaataaccaactagcatcataatgacaggatcagattaacacataacaatattaaccttaaatgcaaacgggctaaatgccacaattaaaagacacagactggcaaattggatagagtcaaaatccatcattgtgctgtattcaggagacccatctcacgtgcaaagacacacataggctcaaaataaagggatggaggaatatttaccaagcaaatggaaaggaaaagaaaaaaagcaggggttgcaatcctagtctctcataaaacagactttaaaccaacaaagataaaaaaagacaaagaagggcattacataatggtaaagggatgaatgcaacaagcagagctaactattctacatatatatgcacccaatacaggagcacccagattcataaagcaagttcttagagacctacaaagagacttagactctcacacaataataatgggagactttgacactccactgtcaatattagacagaacaatgagacagaaaattaacaagaatattcaggacttaaactcagctctggaccaagcagacctacagaactcagaacttgaactcagctttggaccaagcagacatctacacaactctccacttcaaatcaacagaatatacattcttagcagcaccacatcgcacttattctaaaattgaccacataattggaagtaaaacactacacaccgaatgcaaaagaacggaaatcacaacagtctctcagaccacagtgcaatcaaattagaactcaggattaagaaacttactcaaaaccgcacaactacatggaaactgaacaacctgctcctgaatgactactgggtaaataacgaaattaaggcagaaataaataagttatttgaaacc

SEQ ID NO: 18850 - protein, 113 aa, Homo sapiens
MKMRKNQCKKAENSKNQNTFSPAKDHNSLPAREQNWMENEFDEFTEGGFRRWVITNSSELKEHVLTQCKEAKNEKRLEELLTRITTLEKNINDLMELKNTARDLREAYRSINS

SEQ ID NO: 18851 - DNA, 2679 bp, Homo sapiens
tactgccatttaaaaataggtttttaaaatttagctaagtcttaagtaatttgccgttgctaataattttatctccttgagtcggttgttggggagagatgttatattcaataatttttagttattttgtaatgcagagtgtttattcatttcacagttctgcaatggatgtagtattttgggattgccctgtccagaaaattttcagctacacacctttaaaggaaaatgtttctatctcagatgaaacatgtaatttgggatggttcttcctttgtcacttaaaggaagagataggaaaagtctcttacccactttaaacatgagggtaaaggtttaggtcaaacttactggctttgtcattcaagcatatctgaatcctcacttttttctctttgctttttagggtcagaactgagatattaccaagaaaaggcacaatgccataatattatggtgttatggtattttgacttaaaggggaaaaggtacttaattttggtgggatgttgattgtaccttgttaaaaagactctcattttctcatatgttttctcctaataagatggaatatggagtatactgtaataatataagcgttcattataagctatctggattaagaactattgcagagttgtaagcttgttatcaaattaatgcaagacatttaaactatttttttgcaaaaccatttatttttaaaacaacttaaagtatatctagggtgagttaaaagtccctgtgcatctatattagatggcaggttttgtcacagagtcactgtgtattaataataaatgttgaaatggcttctccgtgtctccagaagcatttacatgtcctccttgtgagatcatggtgcacagaggtctttggactgccctgaacccgtcttatgtggacataacctattcccttcgttttctcatcatgccatgtgtttaagatctacccgcttagtgtcaagattattgagattttcatctaaatgtttttaaaattgtattttgtgttttagtggaggacagtcttgatactgttctaattcagaaagccaaattttgatgcgcttttgtatattcataatatatactttaatatgccctattctaatctagtttgaaattgttagattctgatagtataatgataaaatcaaactatttgccaaaaagttaaatttacaagcagaaagatgttttgcgatattttctacttttgtgtagaaagataaccatttggggtaggcagcacaacagaatgtgaaagattggctttatatgatactaacacagtccagttaaaagtggaaacagggaaaagagagagagaaaactcatcatttagtttggtctagacacaatttggttaaattttaggattctattggcagttaacatagatgacatggacacagcctatgagtgctttttaaatacgtgcttctaaaaatctgagctcaaagcaagaaaaagaaaacaggaaagctgtatccatttgccataatagatgaatcagaattgttttctattaaatatttcatcacgaaatatgatggaggccagaagctatttttaggcttactataacactattatgcatttttataaataagaagaaggctgtagaaagtacttgaaaaatatctaattctctttctgtctaaggaaaactctttctacttggtgcaataatctgaaaatttagaaggtcaaaatatgtcacagggaatgatcatagacctaaaaatagtttttaaggaaaccagctacacggggcaaccaaccatcttgctgttgaagaaaacagttccaaaaggctaaatcattggcataaaggaaacaaaacccaaagtatgcgttgtaattcttgagccagtattactgaaacaggataaaagttataaaatctaacataggttaatgcaatgtctctgctagtgctacaagtctaaaatatctttgtaacaatgctttcagaaatgccagttttaattacatttcacattgtatatgagagatactgctttatgaatgaatcggaataatacattttcatttaaatcttaattgcttttcattaaatgcgaagtcttaatttcaaaatgaaatcacactaccagcaatagacagttttcttgaaaactctaataaggaacaatagccagttccgtaaataactttaaaattctaaaagtgttggtacactagcaatcacaaatatggtttcttttaatacttttttaatcctgtaaagaagggtttttataaacattctttttattaatcagtcataacatggcgaagtgtgtagttgctgtttctgaaaagtgatccaaactctacatccagagattatgaaaaattcttatagaattttgtaacaagtatttacatgttgggtgaaagaaatttcatagtcgttggagtgccatgaaattaatacttgcaattcagattgcggtagtttacactttttctgtatgtttcaaatcaggtgtgtaccatttgtactgagaacaccacagaatgaattatccaaagtccattgattttaatacgtgttttggtttgtaaacaaattatagtaatttcttgcacatttttggaaattaattgtataagaatttatgtatctgcttctagatacagtgtgtaaataaaaaatttcgttcac

SEQ ID NO: 18852 - DNA, 3315 bp, Homo sapiens
  CDS (475)..(1194)
cacacagtcgaaaagagcaggcaaaagaatcctcgaagcttatgtatccagccacagacggctcccgatgcgctgccccctgagaaaacacttgaattgacgcaatataaaacaaaatgtgaaaaccaaagtggatttatcctgcagctcaagcagcttcttgcctgtggtaataccaagtttgaggcattgacagttgtgattcagcacctgctgtctgagcgggaggaagcactgaaacaacacaaaaccctatctcaagaacttgttaacctccggggagagctagtcactgcttcaaccacctgtgagaaattagaaaaagccaggaatgagttacaaacagtgtatgaagcattcgtccagcagcaccaggctgaaaaaacagaacgagagaatcggcttaaagagttttacaccagggagtatgaaaagcttcgggacacttacattgaagaagcagagaagtacaaaatgcaattgcaagagcagtttgacaacttaaatgctgcgcatgaaacctctaagttggaaattgaagctagccactcagagaaacttgaattgctaaagaaggcctatgaagcctccctttcagaaattaagaaaggccatgaaatagaaaagaaatcgcttgaagatttactttctgagaagcaggaatcgctagagaagcaaatcaatgatctgaagagtgaaaatgatgctttaaatgaaaaattgaaatcagaagaacaaaaaagaagagcaagagaaaaagcaaatttgaaaaatcctcagatcatgtatctagaacaggagttagaaagcctgaaagctgtgttagagaccaagaatgagaaactgcatcaacaggacatcaagttaatgaaaatggagaaactggtggacaacaacacagcattggttgacaaattgaagcgtttccagcaggagaatgaagaattgaaagctcggatggacaagcacatggcaatctcaaggcagctttccacggagcaggctgttctgcaagagtcgctggagaaggagtcgaaagtcaacaagcgactctctatggaaaacgaggagcttctgtggaaactgcacaatggggacctgtgtagccccaagagatcccccacatcctccgccatccctttgcagtcaccaaggaattcgggctccttccctagccccagcatttcacccagatgacacgtccccaaagtccacagactctctgaaagcattttgatgcaggtctgcaggactgaccccaaggaggaacgtgggcacaagaggtatatcagcacacgtgtgatcaccgtagggtaactggagcgtcaccaccggcggaatcgcagcttctgagactggaagtctggaggaagacttttgcctccgtccaaaagattcctccaaaaaaagatttaaaaaaagatttcggcatcgacacggacgttgttgcacaaagcacttaaagaacgagagcatcttgttcattgcctttttcacctaagcataaggggaaaaactctcagggccctattaagatttataacctttgtaatgttcttcaccacagacaccttcttgtgagttttcagtctgactgtgggggtggggggtgtgaatgaaatggatgtcacagagtgtcatgtgtctgatgcagcctcctctgctgtgtattaaatgtcaaaatctgaatatatctggatatgtactaatcaaataataatcaatcaatcagcatatacatttcagccaaagccatagaagaaaaagcaatagttgcttgaattatgatcatctaccaccaactctgctcagccctgtaacagggtagggagagggtataacaggaagagctttgacttgtccctgtctatacattctctgtatcttttgggggtaacttcttggcagtttttcagtgttcagccatgtcagttgaaactagatttttctgtagattttttacttacccatgtgagcctaacactatcctgtaattcattttctcaggctatgtgtaaatgtagaaccctaatttttctataaaaaaacaaactaactaactgtgtaaagaaagaaaaagggaagtaccaatgggtttttccaccttatttttacctttgatctacccttgcagatttaacctgtcttcttccctcccattattctcattttccttttacctttctccaccatccagagccacaaaagcaaaccttctacctcctacctacttttctctgggacaaggataaaggaatatgattttccagagccccagagccagctcatcttccaggtgctgaaaccactttccaaataaactaaagcctggatttgatattacaaattttgggaaatcttagaataaagaacgagaacaaggaagtcattggctagtataattaagaaaggtaggattcagtgcttaccgatgatgcagtacttgatagaagaaaacagtctgggaggatagcgctcatttttcagttaccctttaaggagtccctttgtctttgggaaagtagcagaatggtccgcttctttcccatgagtggaaaatgtggcttgtccaactctcctccaggttgcatttcagtttctttccaaaacttattacctcccctaatcctgagactttggaaaaggtggaaggaagaactgttgctttatctccccctccctgcatgtgtcaacattgtgatgtcagtatttactaatctacattcagtggctgtacaaataacagctgtagtaagaagagattcaggatgctagaggtgaatatttgggtcatttacatgtacactacatagcaagttgatactcatgttgcatgttcttttaaattagtgattttgtgtcttaagtctttaacttccaatacttcatcatgtatgtaaccttccatgtttgcttctgataaatggaaatgtaggttcactgccacttcatgagatatctctgctcacgcttccaagttgttctcaatgacattagccaaagttgggtttgccattcatcccctaggcatggtaaatcttgtgttgttccctgctgtcctccgtattacgtgaccggcaaataaatctcatagcagttaatataaaacatctttggaggatgggagaggacaggagggaagatgggaaacaaaatagagacttcttaagattttgtttaaaccaaatgtttcatgtagaatgcaaaatgttggcacgtcaaaaatatgaatgtgtagacaactgtagttgtgctcagtttgtagtgatgggaagtgtattttactctgatcaaataaataatgctggaatactc

SEQ ID NO: 18853 - protein, 240 aa, Homo sapiens [sequence omitted]

SEQ ID NO: 18854 - DNA, 1815 bp, Homo sapiens
  CDS (287)..(754)
gagctcggttagggcctcacttccctgcttccacacctcagggaggcctcggtgattttgccagagcctcagcctccatcgctctgtaacctgcgggtattggatgattcgtagctaagacttcgcgacacccttgaagctgagaaatggaacccttaacattcagggatgtggccatagaattctctccagaagagtggaaatgcctggaccctgcccagcagaatttgtatagagatgtgatgttggagaactacagaaacctggtctccctaggtgtctggaaatgaagtatggaaatgaaatcatgaataaagacccagttttcagaatctctccacgaagtagaggaactcataccaatccagaagagcctgaagaagatgttcaagctgaaagagtccaagcagcaaatgcactcactactccaaacttggaggaggaaccagtcataactgcaagctgtttacacaaggaatattatgagacaaagaaagttgcttttcaacaacaaggaagaaagcagccatcagaaatgtttcgttttgtgttaaaaagtgaagttttgggattactaggacacaatggagctggcaaaagtacttccattaaaatgataactgggtgcacagtgccaactgcaggagtggtggtgttacaaggcaacagagcatcagtaaggcaacagcgtgacaacagcctcaagttcttgggtactgccctcaggagaactcactgtgtcccaaacttacaatgaaagagcatttggagttgtatgcagccgtgaaaggactgggcaaagatgctgctcttagtatttcatgattggtggaagctctcaagctccaggagcaacttaaggctcccgtgaaaactctatcagagggaataaagagaaagctatgcttcgtgctgagcatactggggaacccatcagtggtgcttctagacgagctgttcaccgggatggaccctgaggggcagcagcaaatgtggcagatacttcaggctaccattaaaaaccaggagaggggcgccctcttgaccacccattacatgtcagaggctaagtctctgtgtgaccgtgtggccatcatggtgtcaggaacgctaaggtgtattggttccattcaacagctgaaaagtttggtaaagattatttactagaaataaaaatgaaagaacctactcaggtggaagctctccacacagagattttgaagcttttcccacaggctgcttggcaggaaagatattcctctttaatggcatgtaagttacctgtggaggatgtccaccctctgtctcaggcctttttcaaattaaaggcagtgaaacagaccttcaacctggaggaatacagcctctctcaggctaccttggagcaggtgttcttagaactctgtaaagagcaggcgctgggaaatgttgatgataaaattgatataacagttcgatggaaacttctcccacgggaagattcttaaaacgaagaacctcctaacattcaattttaagtcctactgcattattagtttccataattctacaagaatgtttccttttacttcagttaacaaaagaaaatattcaatagtttaaacatgcaacaatgattaaagttttcatttttaaaaattttaggatgaaggaaacaaggaaatatagggaaaagtagcagacaaaattaacaaactcagacatgttattcatccccaacatgggtctattttgtgcttaaaaataattttaaaatcataaaatattaggtttgtttttggttattatcaataaagttaacactgagcacatttt

SEQ ID NO: 18855 - protein, 156 aa, Homo sapiens
MKYGNEIMNKDPVFRISPRSRGTHTNPEEPEEDVQAERVQAANALTTPNLEEEPVITASCLHKEYYETKKVAFQQQGRKQPSEMFRFVLKSEVLGLLGHNGAGKSTSIKMITGCTVPTAGVVVLQGNRASVRQQRDNSLKFLGTALRRTHCVPNLQ

SEQ ID NO: 18856 - DNA, 2229 bp, Homo sapiens
  CDS (120)..(2033)
aatgaaccaaattcacaatcaaaatttccaatttttcggtttccttcatcattctcttctcccgttggaatggtatttcatccccgaagccactttttgtatgcttatggcaatcaggaatgggaagatacagtgcagtcggaagtgttactgagagaattttcacattatactatgatcacttgggattcctacataagctgactctgggtcgctttgaagctagtggaccacccacagcctttggaaattctagaaatctttttggacagcctccagatatgggctttgagactgcgcttgccccacagcacacctccttagatgaaattatcttttttgcatatgtacctgagaacgaaccccaggaaacgatctacagcaagaagttcggcaatatacactatggaaaagtgatacactctgggaaaactggaagagcttacataagaaaggtattgcaacatacgactcctaaaggatttttgtcctcagttattgcagaaatgaaagagccctttggattagaagaagtgaatgagagctcttgtttgtctagttcccttttgattaataaagctggaaatgtctataaactcactcttgattcacaagttgttcaggccttgtttgaagatacagatatagagaagactgtagtgcttcccgggtacagcagcttcctcatcacaagcattttagataataagaatgcattagccattgctaccatgcctgaaagtgcacccaacaatatgacctttctaaagagcacatggttcttatacaactttgggcaaaggaatggacgaacatggaaaatatattcaaaaccatgtaattattggtttcaacatgatgattcaccatccctcaacattgtgaaatacattgatctgggaaactcttatgttttaaaagctaaggtcatacggaatgcaaaaggttttcgaatgcttgaaataccactactgactgtgtttgttggaaaccctaatttgttggaagttacagctgaagtcacttttgatgatactgacagttatgtaataacaatttctgcagctagcaaagttttacatcagggttcaacttcactggcatttattatgtggtcagcctctactgagtgctttgttacgacaatggtgccaacactgaaaagcagctgtagttatctcagatctatgcatcacattcctagcaaatttatcccatttgaagactggattagtggagttcataaagacagtcagggttttaacctcatcaaaactttgccgataaactacaggcctccatctaatatgggaattgctattccactcacagataatttttatcatgcagatcctagcaaacccataccaagaaacatgtttcacatgtcaaagaaaaccggtaaattcaaacagtgtgctaatgtttccactcgggaggagtgtaactgcacaaaggatcagaagttttcacatgctgttgctttctcggattgcagggaaaaagttcctcgctttaagtttccaattacacaatatccagtttctttggaaattatcaacgaggatggacgtgtcccattgcaatctccatatctggttactgtgactgaagtgaacatgaggcacaactggaaactgaaacacactgtgccagaaaatattaaaagaatgaaacaattagtagaaccaattcttggtgctgcagtgtataatccttcaggtctcaacttaagcataaagggctctgaacttttccactttagagtgaccgtcatttcaggagtaactttttgtaacttaattgaagaatttcagatttatgttgatgaggcaccattgccattcccaggacacacgcttattgccgtggcaacagcggtagtgctagggggattaatttttatagcatttatgtttcaactgcaaggcatccatccgtggaggacattccaaagatggattagaagaaaccaagagaagttttcaagtatctctctcagtgagctgattcatagatcaaagtctgaagagtgaacacatggtgatcataatttctctttattttctagttttatcagccaattcctagaacaatatatttaaatgttaaatatgcaagctacataaaatcctaaagaattgtcattataattcaaactgctacttgtcaatatattcaccatttccttttcttattttgaatacatagaaaatgtcttatgccagg

SEQ ID NO: 18857 - protein, 638 aa, Homo sapiens
MGRYSAVGSVTERIFTLYYDHLGFLHKLTLGRFEASGPPTAFGNSRNLFGQPPDMGFETALAPQHTSLDEIIFFAYVPENEPQETIYSKKFGNIHYGKVIHSGKTGRAYIRKVLQHTTPKGFLSSVIAEMKEPFGLEEVNESSCLSSSLLINKAGNVYKLTLDSQVVQALFEDTDIEKTVVLPGYSSFLITSILDNKNALAIATMPESAPNNMTFLKSTWFLYNFGQRNGRTWKIYSKPCNYWFQHDDSPSLNIVKYIDLGNSYVLKAKVIRNAKGFRMLEIPLLTVFVGNPNLLEVTAEVTFDDTDSYVITISAASKVLHQGSTSLAFIMWSASTECFVTTMVPTLKSSCSYLRSMHHIPSKFIPFEDWISGVHKDSQGFNLIKTLPINYRPPSNMGIAIPLTDNFYHADPSKPIPRNMFHMSKKTGKFKQCANVSTREECNCTKDQKFSHAVAFSDCREKVPRFKFPITQYPVSLEIINEDGRVPLQSPYLVTVTEVNMRHNWKLKHTVPENIKRMKQLVEPILGAAVYNPSGLNLSIKGSELFHFRVTVISGVTFCNLIEEFQIYVDEAPLPFPGHTLIAVATAVVLGGLIFIAFMFQLQGIHPWRTFQRWIRRNQEKFSSISLSELIHRSKSEE

SEQ ID NO: 18858 - DNA, 2174 bp, Homo sapiens
  CDS (198)..(1967)
gtttttgtgttgctagccggggccagcggcggtggcggcggcggcggaggcgtcggtggaggaggggaggcggcgaggaggcgcagctcccgctgcaccgcgatcgacgctgcggagcgagcccacccgccccgggagctcgcctccccggtgctcccccgccctccccgcccccccagcggcgctgcctcctccaaatgagcgattcgcccgctggatctaacccaaggacacccgaaagcagcggcagcggcagcggcggcggcgggaagaggccggcggtgccggcagcggtgtccctcttgccaccggcggaccccctgcgccaggcgaaccggctcccgatcagggtcctgaagatgctgagcgctcacaccggtcacctcctgcacccggagtacctgcagccgctgtcctccactcccgtcagccccattgagctggacgccaagaagagccccttggcgctgctggctcagacctgctcgcagatcggcaagccggacccgccgccctcctccaaactcaactcggtggcggcggcggccaacgggctgggagcggagaaggaccccggccgctcagccccgggcgccgcctccgcagccgcggccctgaagcagctgggggactcaccggccgaggacaagtccagcttcaagccctactccaagggctccggcggcggcgactcccgcaaagacagcggctcctcctcggtgtcttccacctcctcctcgtcctcctcgtccccgggagacaaggcgggcttcagggtccccagcgccgcctgcccgccctttcccccgcatggagcgccggtctccgcatcctcgtcctcgtcgtcgcccggcggctcccgcggcggctccccgcaccactctgactgcaagaacggcggcggggttggcggcggggagctggacaagaaagaccaggagcccaagcccagcccggagccggcagccgtgagccgcggcggcggtggggagcccggggcgcacggtggcgccgagtccggggcctccgggcgcaagtccgagccgccctcggcgctggtgggggccggccacgtggcgccggtgtctccctacaagccgggccactcggtgttcccgctgccgccctccagcattggctaccacggctccatcgtgggcgcctacgccggctacccgtctcagttcgtgcctggcctggatcctagcaagtccggcctcgtgggaggccagctgtctgggggcctgggcctgccgccgggcaagccccccagctccagcccgctcaccggggcctccccgccctccttcctgcagggattatgccgcgacccctattgcttgggaggttaccacggcgcctcgcacctcggcggctccagctgctccacctgcagcgcgcacgaccctgccgggcccagcctgaaggcggggggctacccgctggtgtaccccgggcacccgctgcagcccgccgcgctctcgtccagcgccgcccaggccgcgctccccggccacccgctctacacctacggcttcatgctgcagaacgaaccgctgccgcacagctgcaactgggtggcagccagtgggccgtgcgacaagcgcttcgccacctcggaggagctgctcagccacctacggacccacacggccctgccgggagccgagaaacttctggccgcctaccccggggcctcgggcctgggcagcgccgccgccgccgccgccgccgccgcctcctgccatctgcacctccccccgcccgccgcccccggcagccccgggtcgctgtccttgcggaatccacacactttgggcctaagccggtaccacccctatggcaagagccacttatccacagcggggggcctggccgtgccgtccctccccacagccggaccctactattcgccatacgcgctgtatggacagagactagcttcagcctcggcgctgggataccagtaactacagctcttcctccaccccagccccctcaccctcctccctctccctcctcctccctccccacctgccgtcgccgctgcaacctccactactgcttgaccctgccgggattccccacccaacccttccccaccggactgtgtatttatttactataatgttagcttacaagctgggaatataagtgcattaacggcccacatg

SEQ ID NO: 18859 - protein, 590 aa, Homo sapiens
MSDSPAGSNPRTPESSGSGSGGGGKRPAVPAAVSLLPPADPLRQANRLPIRVLKMLSAHTGHLLHPEYLQPLSSTPVSPIELDAKKSPLALLAQTCSQIGKPDPPPSSKLNSVAAAANGLGAEKDPGRSAPGAASAAAALKQLGDSPAEDKSSFKPYSKGSGGGDSRKDSGSSSVSSTSSSSSSSPGDKAGFRVPSAACPPFPPHGAPVSASSSSSSPGGSRGGSPHHSDCKNGGGVGGGELDKKDQEPKPSPEPAAVSRGGGGEPGAHGGAESGASGRKSEPPSALVGAGHVAPVSPYKPGHSVFPLPPSSIGYHGSIVGAYAGYPSQFVPGLDPSKSGLVGGQLSGGLGLPPGKPPSSSPLTGASPPSFLQGLCRDPYCLGGYHGASHLGGSSCSTCSAHDPAGPSLKAGGYPLVYPGHPLQPAALSSSAAQAALPGHPLYTYGFMLQNEPLPHSCNWVAASGPCDKRFATSEELLSHLRTHTALPGAEKLLAAYPGASGLGSAAAAAAAAASCHLHLPPPAAPGSPGSLSLRNPHTLGLSRYHPYGKSHLSTAGGLAVPSLPTAGPYYSPYALYGQRLASASALGYQ

SEQ ID NO: 18860 - DNA, 1870 bp, Homo sapiens
aaaatgggccaagggccccgggcttggaagggcaggtggcgcctagacccagcgttcccgctccacaggtctccaggagttcgcccggcgtttcctctgcagcgggtgctactctagggtctgcgacctcccgctggactgcccagttcaggatgtgacagtgactcggggcgaccaggctatgttttcttgcatcgtaaacttccagctgccaaaggaggagatcacctattcctggaagttcgcaggaggagctccggactcaggacttgtcctatttccgagatatgccgcgggccgaaggatacctggcgcggatccggccggctcagctcacgcaccgcgggacgttctcctgcgtgatcaagcaagaccagcgccccctggcccggctctacttctttcttaacggtggggcggggcgcggccgcgtgagtgagcggggtcgggagaggggtggggctcgtgcctggctgacgtgcgcgcccccgcagtgacgggcccgcccccgcgggcggagacagagttgcaggccccgttccgggaagtgctgcgctgggcgccgcgggatgccgagctgatcgagccctggaggcccagcctgggcgagctgctggccaggcccgaggctctgacgcccagcaatctgttcctgcttgcagtcctcggggccctcgcatcagcgagtgcgacagtgttggcgtggtgagttctggggactccggagccccagcatctagctccccgctgtctcagatcccaccgagaagtctgggttcccaacaacctccaacccaggaggtcaggctttcagttcctcctctctcagacccacgagtccaggtcccagcccctctttactagcccaggaatccaagttcccagccccctcctcccttagatctaagagtccaggcccccagcccctcctccctcagacccaggagtccaggtccgcagcccctcctccctcagacccaggattccaggccccaaacccctactccttcagacccaggagtccaagtccccagtcccctcctcccgcagatccaagagtccaagcccccggaccccctcctccctcagacccaggagtccaggcccccagcccctcctccctcagatccaggagtccaggcccccagtccttccacccgcagacccagaaatccatgaccctagcccctcctccctcagacccaggtgtccaggaccccagccctctcctccctcagacccaggtttccatccaggcccctggcccctcctccctcagacccaggaatccaggcccccagcccttccacccgcagacccagaaatccaagcccccagcccctcctccctaagacccaggagtccaggcccccagccccctctccctcagacccaggtttccatccaggccccggaccctcctccctcagacccaggagtccaggccccagccctctcctccctcagacccaggtttccatccaggccccggaccctcctccctcagacccaggagtccaggccccagccctctcctccctcagacccaggagtccaggcccctggcccctcctccctcagatccaagagtccagacccccaagtttctcttccttcagacccaaaagcccaggccccctgccccctcctccctcagaaccaggagtctgggccctgtacacctttttgaccctggtgtccaggcctccgggacctaagtctctagtcaccaacccctcctgtagcacacatacctctttgtttccccaggatgttctttcgatggtactgcagtggcaactaacaaaggtatctttcctccttccctatcctatttccatcctgaaaataaagaatatatttcaactct

SEQ ID NO: 18861 - DNA, 2375 bp, Homo sapiens
  CDS (464)..(1714)
acagtcacttactctacaggcagtggggcccgacacagacagcgccgcccccgccagccagcctcgcacgccctcggaagcgcaggctcccggcgctgcgctggagggttccccggcaccccagcctcccgtccccagcccgctgcacctccgggccccccttacccttgagaggcaccgggagttgtcgcgggggggcctcgggaaattccccggacccctgtgccaggaggtgcccggttcgcccgctcttcaccccccgccccccccgagggcggtgcccgggggtgctgccccatggagcggggaggcgggcgccgtctgctccgggagccctgacccgagtcggagctgtgtgtcgcagccgccccgaccccccgccgatcatgcgccggcgcccctggctctccagtcccactgggctgtgagccccccactcccagcccgtcagggcctgcgcgccatgggcagcgcccaccctcgcccctggctgcggctccgaccccagccccagccgcggccagcgctctgggtgctcctgttcttcctactgctgctggctgctgccatgcccaggtcagcacccaatgacattctggacctccgcctccccccggggcccgtgctcaatgccaacacagtgtgcctaacattgccaggcctgagccggcggcagatggaggtgtgtgtgcgtcaccctgatgtggctgcctcagccatacagggcatccagatcgccatccacgaatgccaacaccaattcagggaccagcgctggaactgctcaagcctggagactcgcaacaagatcccctatgagagtcccatcttcagcagaggtttccgagagagcgcttttgcctacgccatcgcagcagctggcgtggtgcacgccgtgtccaatgcgtgtgccctgggcaaactgaaggcctgtggctgtgatgcgtcccggcgaggggacgaggaggccttccgtaggaagctgcaccgcttacaactggatgcactgcagcgtggtaagggcctgagccatggggtcccggaacacccagccctgcccacagccagcccaggcctgcaggactcctgggagtggggcggctgcagccccgacatgggcttcggggagcgcttttctaaggactttctggactcccgggagcctcacagagacatccacgcgagaatgaggcttcacaacaaccgagttgggaggcaggcagtgatggagaacatgcggcggaagtgcaagtgccacggcacgtcaggcagctgccagctcaagacgtgctggcaggtgacgcccgagttccgcaccgtgggggcgctgctgcgcagccgcttccaccgcgccacgctcatccggccgcacaaccgcaacggcggccagctggagccgggcccagcgggggcaccctcgccggctccgggcgctcccgggccgcgccgacgggccagccccgccgacctggtctacttcgaaaagtctcccgacttctgcgagcgcgagccgcgcctggactcggcgggcaccgtgggccgcctgtgcaacaagagcagcgccggctcggatggctgcggcagcatgtgctgcggccgcggccacaacatcctgcgccagacgcgcagcgagcgctgccactgccgcttccactggtgctgtttcgtggtctgcgaagagtgccgcatcaccgagtgggtcagcgtctgcaagtgagcggcccggggtcccctgggccctgatcgaggtcccctcctggagcctggccctctgaggcttacggtcttggcaaggcagcatcgccttggctcttgggaagaggagattggaccacatgatcttataggaacccctcagctctgaggtctgtgatcgccggacagtccaggcctgtctgaaccccaccactcacttctgtgggctctaggactgactgggttcttcctccctccccgaagcccagacagttcagttgggctgggggttgctccacaccctaaaacaagcctcagccaggcaacccgtcagtctgtctccatcctttcaccccttccctggagatgggaggtggggaatgaatggaagctgacgggcagagagaggaggattaaaaaaaagaaatagacataactgagctgaagtaattccataaagggcccagacagcctcctccaccattcccttcatcattcatttaacaaatatttattttgcactctctttgcggcactctgggggcggtggggtgcgtgggggtggcaatgcaaggcactgaggccacagatgtgagtaagcgagacacaacacttgtcctcttggaggttacattcttgctggggggaggcatgggcaataaacaagtaaatatacaaac

SEQ ID NO: 18862 - protein, 417 aa, Homo sapiens [sequence omitted]

SEQ ID NO: 18863 - DNA, 3648 bp, Homo sapiens
tttgttttgagacggagttttgctcttgttgcccaggctggtgtgcaatggcacgatctcggttcaccgcaacctctgccttccaggttcggacgattctcctgcctcggcccccagagtggctgggattacaggcatgtgccaccacacctggctaattttgtatttttggtagagatggggtttctctgtgttggtcaggctgctcttgaactaccaacctcaggtgatctgcctgcctcggcctcccaaagtgttgggattgcaggcgtgagccaccatgcccggccagtttttaaagaactccttcttactactcagattactcctttttaaatagtggtttttaaaaaatatcaaagtagactgggcacagtggctcacacctgtgatcccggcactttgggaggctgaggcgggctgatcacctgaggtcaggagttcgagaccaggctggccaacgtggtgaagccctgtctctactagaaatgcaaaacttagccaggcctgcagttccagccactagggaggctggggtgtgaggatcgctcgaaccaggaggccgttgcagtgaaccgagatcacgccagtgcacttcagcctgggtgacggagtgagactccgtctcgagaaaagaaaaaaaaacgcaatgcagcagtggctcacgcacataatcgtagcattttgggaggccaaggcaggaagatcacttgagaccaagagttcaagaccagcctgggcaacaacaagaccccctccccccatctctacaaaaaatttaagaaaaaaaatttttttaaatcaatatggcatcctgttgcacaaattgcagtatattttgaaagatttattctgtttcttttgtcacctccatttcccagggctactgttgctctgtttgagctatgccctggaccattgagtggcttagactgtgctcacaataggtgtcccttcatcccttcagaagacaaacatggacatacgtcctaaaccaggaaggggttcagtgatggctcaggaaaatcggggcagggtgcagttatcctctaggcgagctgccgttttctttttcctttcctctcttgtggttgcctagaattagcttgggcactactatggtttttttctgtctgcaggccccaggagaccttctgtggacccaatatacttaacaatcatatgcagtgtagacctgctctggtgtcaattctaaccaaaacaaaaaaaaagcatttatgagacactcagggaaattcaagcagtaactgaataatattagatgatactaaggaattagtgttactttttaaattggataatagtattatgtttatgttaagaatcttgatctcttggtgatacatacctaagtaattgcatttgaaatgctaggtctcggatttgccttaaaagaattcagttagaatggcgtgggtatagaccagtggttccttactgggggctatttcccccacaaaggcatttagcaatgcttggagatacttttggtcatcaaaattgggaatttgctacagacatctaataattagaggctagggatattgttaaatgtcctacagtgcacatgacagacccacataacagagaattgtatagcccaaaatgtcattagtgtgacgttgagaaaatatatatgcagcatatgttttgtaaaaaagaagcccttaccagtctctgtgacaaactctctactctgtgtagagcactgtttttccagctgagtctagatgggaagccccgcttgtcatttgggctgtgggtgtactggtgctgggttggcaggcctttgcttaagtaccatcctggtacctcaaggtccactttcaaccccagtcccaattccctctgagcttgaggtgtttccaggcccaaactggtagaactagtacttagttttcagctggaggctctttggctctgttcgatctcttggacatcgagtctggtctgttttgtcttccagaaatctctcaaagattctgatctacatatgccaccgtttgctgcctttcagatatgctgttgattcattagtatttttatatttcttctaccatgtcagtgtgctttgggggaagatgaagtaaattcatggatttagcccagtgtcttaagccaaaggtgcctaattactttcttcttcttctttttttttttttttttttgaggcagagtctcgctccgtcacccaggctggagtgcagtgccacgatcttggctcactgcaacctccgcctcctgggtacaagcgattctcctgcctcagcctcctgagtagctgggaccagaggggtgtgccaccacacccactaattttgtatttttagcagagacggggtttcatcatattggccaggctggtcttgaactcctgaccttgtgatccacccgcctcggcctcccaaagtgctgggatgtgcctaattactttcttataatacctgatatactgccccctgttgttggaatttaacaaagacatttagtgataaattactatttttttttgttctttggctcaacgtaatccattgtttgttttgtgcctgttatgtgtgagaccctgtgctaggttttaggtgtacagtgagaatgaagcagacatgtaatccttgctcttgtggaatttatgctataaaggagggatattcattaatcaacaaagtcaaatatgtaattataaagtgtgagaggtattatcaaggaaaataataaggtccttgccttacaaaaatagtataggaaataacagcaaatttttttttttcttgagacagagtctcgctctattgcccaggctgaagtgcagtggcgcaatctcggctcactacaacctctgccccccaggttcaagcgattctcctgcctcagcctcctaagtagctgagattacaggcatgtgccaccacacctggctaattttttttgtatttttagtagagatggggtttcaccatgttggccaagctggtctcgaattcttgacctcatgatctgcccacctcggcttcccaaagtgctgggattgcaggcgtgagccactgtgcctggccgtaacagctaaaatgaagtacacactgtgtgctagttactgtgccaacaactttacatgaaagatctcatttaatacgcagaataacttatttcagaaatgaggaaactgagacttatgatcctaatttagtattaggaagtcagagaagacctgtgtgggaaaagtgacacacagagaaccagacaagtaggagataaccaggcaaagaacagagagaggctgtgtaaagcagaaggaataacatgctcaaaggcctgaggatgaatgaatgaaagcatggaaggacaccagtggctgaaattgagtgagcaaggaaagagtgcaagagatagggcaggtaggggctaaatcgagggggttgttagagtccaggataaggagattagatttcattctgaggcatgagaaactgttggagggttttacctaagagtgggacacaacctgagttgctttcctagagatcactctgctttgtggagaatggattggcaggggcagaggcttactgtgatccaggtgagagaggatggaggttgggactacactggtggcaataaaaaaaatgc

SEQ ID NO: 18864 - DNA, 3557 bp, Homo sapiens
  CDS (25)..(3468)
gagagggtccttcagggtctgcttatgcccttgttcaagaacaccagtgtcagctctctgtactctggttgcagactgaccttgctcaggcctgagaaggatggggcagccaccagagtggatgctgtctgcacccatcgtcctgaccccaaaagccctggactggacagagagcggctgtactggaagctgagccagctgacccacggcatcactgagctgggcccctacaccctggacaggcacagtctctatgtcaatggtttcacccatcagagctctatgacgaccaccagaactcctgatacctccacaatgcacctggcaacctcgagaactccagcctccctgtctggacctacgaccgccagccctctcctggtgctattcacaattaacttcaccatcactaacctgcggtatgaggagaacatgcatcaccctggctctagaaagtttaacaccacggagagagtccttcagggtctgctcaggcctgtgttcaagaacaccagtgttggccctctgtactctggctgcagactgaccttgctcaggcccaagaaggatggggcagccaccaaagtggatgccatctgcacctaccgccctgatcccaaaagccctggactggacagagagcagctatactgggagctgagccagctaacccacagcatcactgagctgggcccctacaccctggacagggacagtctctatgtcaatggtttcacacagcggagctctgtgcccaccactagcattcctgggacccccacagtggacctgggaacatctgggactccagtttctaaacctggtccctcggctgccagccctctcctggtgctattcactctcaacttcaccatcaccaacctgcggtatgaggagaacatgcagcaccctggctccaggaagttcaacaccacggagagggtccttcagggcctgctcaggtccctgttcaagagcaccagtgttggccctctgtactctggctgcagactgactttgctcaggcctgaaaaggatgggacagccactggagtggatgccatctgcacccaccaccctgaccccaaaagccctaggctggacagagagcagctgtattgggagctgagccagctgacccacaatatcactgagctgggccactatgccctggacaacgacagcctctttgtcaatggtttcactcatcggagctctgtgtccaccaccagcactcctgggacccccacagtgtatctgggagcatctaagactccagcctcgatatttggcccttcagctgccagccatctcctgatactattcaccctcaacttcaccatcactaacctgcggtatgaggagaacatgtggcctggctccaggaagttcaacactacagagagggtccttcagggcctgctaaggcccttgttcaagaacaccagtgttggccctctgtactctggctccaggctgaccttgctcaggccagagaaagatggggaagccaccggagtggatgccatctgcacccaccgccctgaccccacaggccctgggctggacagagagcagctgtatttggagctgagccagctgacccacagcatcactgagctgggcccctacacactggacagggacagtctctatgtcaatggtttcacccatcggagctctgtacccaccaccagcaccggggtggtcagcgaggagccattcacactgaacttcaccatcaacaacctgcgctacatggcggacatgggccaacccggctccctcaagttcaacatcacagacaacgtcatgaagcacctgctcagtcctttgttccagaggagcagcctgggtgcacggtacacaggctgcagggtcatcgcactaaggtctgtgaagaacggtgctgagacacgggtggacctcctctgcacctacctgcagcccctcagcggcccaggtctgcctatcaagcaggtgttccatgagctgagccagcagacccatggcatcacccggctgggcccctactctctggacaaagacagcctctaccttaacggttacaatgaacctggtctagatgagcctcctacaactcccaagccagccaccacattcctgcctcctctgtcagaagccacaacagccatggggtaccacctgaagaccctcacactcaacttcaccatctccaatctccagtattcaccagatatgggcaagggctcagctacattcaactccaccgagggggtccttcagcacctgctcagacccttgttccagaagagcagcatgggccccttctacttgggttgccaactgatctccctcaggcctgagaaggatggggcagccactggtgtggacaccacctgcacctaccaccctgaccctgtgggccccgggctggacatacagcagctttactgggagctgagtcagctgacccatggtgtcacccaactgggcttctatgtcctggacagggatagcctcttcatcaatggctatgcaccccagaatttatcaatccggggcgagtaccagataaatttccacattgtcaactggaacctcagtaatccagaccccacatcctcagagtacatcaccctgctgagggacatccaggacaaggtcaccacactctacaaaggcagtcaactacatgacacattccgcttctgcctggtcaccaacttgacgatggactccgtgttggtcactgtcaaggcattgttctcctccaatttggaccccagcctggtggagcaagtctttctagataagaccctgaatgcctcattccattggctgggctccacctaccagttggtggacatccatgtgacagaaatggagtcatcagtttatcaaccaacaagcagctccagcacccagcacttctacccgaatttcaccatcaccaacctaccatattcccaggacaaagcccagccaggcaccaccaattaccagaggaacaaaaggaatattgaggatgcgctcaaccaactcttccgaaacagcagcatcaagagttatttttctgactgtcaagtttcaacattcaggtctgtccccaacaggcaccacaccggggtggactccctgtgtaacttctcgccactggctcggagagtagacagagttgccatctatgaggaatttctgcggatgacccggaatggtacccagctgcagaacttcaccctggacaggagcagtgtccttgtggatgggtattctcccaacagaaatgagcccttaactgggaattctgaccttcccttctgggctgtcatcttcatcggcttggcaggactcctgggactcatcacatgcctgatctgcggtgtcctggtgaccacccgccggcggaagaaggaaggagaatacaacgtccagcaacagtgcccaggctactaccagtcacacctagacctggaggatctgcaatgactggaacttgccggtgcctggggtgcctttcccccagccagggtccaaagaagcttggctggggcagaaataaaccatattggtcg

SEQ ID NO: 18865 - protein, 1148 aa, Homo sapiens
MPLFKNTSVSSLYSGCRLTLLRPEKDGAATRVDAVCTHRPDPKSPGLDRERLYWKLSQLTHGITELGPYTLDRHSLYVNGFTHQSSMTTTRTPDTSTMHLATSRTPASLSGPTTASPLLVLFTINFTITNLRYEENMHHPGSRKFNTTERVLQGLLRPVFKNTSVGPLYSGCRLTLLRPKKDGAATKVDAICTYRPDPKSPGLDREQLYWELSQLTHSITELGPYTLDRDSLYVNGFTQRSSVPTTSIPGTPTVDLGTSGTPVSKPGPSAASPLLVLFTLNFTITNLRYEENMQHPGSRKFNTTERVLQGLLRSLFKSTSVGPLYSGCRLTLLRPEKDGTATGVDAICTHHPDPKSPRLDREQLYWELSQLTHNITELGHYALDNDSLFVNGFTHRSSVSTTSTPGTPTVYLGASKTPASIFGPSAASHLLILFTLNFTITNLRYEENMWPGSRKFNTTERVLQGLLRPLFKNTSVGPLYSGSRLTLLRPEKDGEATGVDAICTHRPDPTGPGLDREQLYLELSQLTHSITELGPYTLDRDSLYVNGFTHRSSVPTTSTGVVSEEPFTLNFTINNLRYMADMGQPGSLKFNITDNVMKHLLSPLFQRSSLGARYTGCRVIALRSVKNGAETRVDLLCTYLQPLSGPGLPIKQVFHELSQQTHGITRLGPYSLDKDSLYLNGYNEPGLDEPPTTPKPATTFLPPLSEATTAMGYHLKTLTLNFTISNLQYSPDMGKGSATFNSTEGVLQHLLRPLFQKSSMGPFYLGCQLISLRPEKDGAATGVDTTCTYHPDPVGPGLDIQQLYWELSQLTHGVTQLGFYVLDRDSLFINGYAPQNLSIRGEYQINFHIVNWNLSNPDPTSSEYITLLRDIQDKVTTLYKGSQLHDTFRFCLVTNLTMDSVLVTVKALFSSNLDPSLVEQVFLDKTLNASFHWLGSTYQLVDIHVTEMESSVYQPTSSSSTQHFYPNFTITNLPYSQDKAQPGTTNYQRNKRNIEDALNQLFRNSSIKSYFSDCQVSTFRSVPNRHHTGVDSLCNFSPLARRVDRVAIYEEFLRMTRNGTQLQNFTLDRSSVLVDGYSPNRNEPLTGNSDLPFWAVIFIGLAGLLGLITCLICGVLVTTRRRKKEGEYNVQQQCPGYYQSHLDLEDLQ

SEQ ID NO: 18866 - DNA, 2266 bp, Homo sapiens
catacaatatggagtgattgtgatggtgggacccctcttagctaattgctctgtggcgccatccgtctggaatgcagaggggtcttgcttactgcctatgctgccttcatgatatgctctctcgttaattcagactgtaaatttcaggctgaaacagactgcctgtgcatgttgccttaataagtcaaatgcagctaatctcaaatttgccctctctcgaagtgtacattaaacaatttagggtgtgcctaaattcacaactgcaaccagcttgcacatccttaagtgggccatacatattcaagcctctggggctttgttatagagtgccactcatttccccttttctgcttgtcagaatcctcattggccttcaagaccaacatgaaacgcctctgcgatgaagctataggagttagcagtggctacctgtcttcgctgtgctcagagcatgccaagggtttctttcccagcattccgatcatgcttccccgtggcctggttaattgtgtgctaggctgtattcctcaacaggctcctaaagactaagaattacatttaattcatttttgtgcccttcacagacccaggagagaggtctgaattctcccaggctgataagatggggagcatccactgagataaagcaagcatcatgtggtgtggtggctggaagagtgtaggatactgccagagagagaaagttgagttatactgtgaaaggcccaaatgtcagctcaggaatcggaactttaccctacagaaaagggagaaattgttaacggttggctaaatgctacatttccaaaaacccactcaggaagctctgtttctatcccagatccactcactgttagctaggcagcctgaggttggctgtttgtgtctcactttcttcatctatgccaggcagacactagtagttccccctcccaaggacaccgtgaggatccacagagttagttcatggaaagtggggagggtgcctggcccataatcgtgagctcccattaaatgccagccacttttacccagcggaacattgccatcctccccacttcctctgcatattggagggaggaaagaaagaggttgcttttgctttgacagcatcttcccccttctgggttcaggatgcttgacctcacacactggggcaactttgttggcattctcttgcatatgggctcttgaactgagcaagcaaagtgcatttcaaggagaaatgggtccacagggctttggttatcacagctggcccacgagaagcagtggggcatgaggcaaaaatggctgctcaggagaggcaggtccaagctcagatttgcaccttgtgaggccttgggcaaggtcagctacccctcagaacttggggtccccatttatgggaggtgggtgaatatgggctcctagcaggtgattattaaacacaatcgttcatgtagtgcgttcagcatagcctgtcacatagcagatgcaaaataaatgataacacatattacttgtgatatccgaaaacttagcagccaggtaaaaacgaaagaggaagggagtcctggaaacagccaacttatattggttatgagaaaagcttggttgtggtatttggcttttaataacaaccatcggagggggtgtggagaccataagttttgcatagacaaaagcaaacatgagaaggatgctgtcctagcaaagcttctagggaccatgaggccatgaggctaccaggccaaaaataccgaaatctaactgccgctgcttgaccatggggaatatctcaccccagtgcagcactggcgccttcccgcagtatgttcctggtcatcgaaccactcaatggattacagtcatctgttcacctctgtgaataactgaaaagggtaaaaaccggaactgtttcctatgccccttgagaatctccaagtgggagccacatggccacttttatctccactggattcactctaaagacacagatgggccaggcatggtgggtcatgcctgtaattccagcactttgggaggctgaggtgggcggatcgcctgaggtcaggagttcgaggctagtctgaccaacatggtgaaaccctgtctgcactaaaaatacaaaatttagccaggtgtggtggtgggcgcctgtaatcccaactattcggaaggctgaggcaggggaatcacttgaacccaggaggcagaggttgcagtgagctgagatagtgctgctgtacaccagcttgtgtggcagagcaagactccatctcac

SEQ ID NO: 18867 - DNA, 3049 bp, Homo sapiens
  CDS (392)..(745)
taccaaagcaagttaagtatagttcctcaaatacctatgacacagcccttcctctaagcctccttccacggaggggccctctctcttccacctgtagaagcccaccccagataccaccaccttcttgaaacctttttgcctctccagcccttggtgcaggctgtcctctcttaggctgtgtgagggctgttttgtgtccatctcctctctcctgctggtttgctctcagcatctgagtcatctttgaatctctggcccttgatggtagcctggcccgagccaatgttctgtgagtgtctgtggaaaggataggtctttcagccccagtgatagaagcccacctctaacgtgcttaagtaagaagggcaagtacctaatcatgtaactgggaatgatgggatgtggggcttcacacagcactgagggagagctgcaggaaccaggccccaggacagaactgtggctgtcctgcccctgttttttctctctctctggttttttttttttttttttttttgggacagagtcttgctctctcacccgggctggagtgcagtggtgcgatttcagttcactgcaacctccgccccgtcccgagctcaggcgctcaagcgatcctcatacctcagcctcccaaataattgggaccacaggcatgtacaacaaagcccagctattttatttgtattttttagtagagatggggtctcatcatgttgcccaggctggtctcaaactcctgagctgaagtggtccgcccacctcggcctcttgaagttctaggattacaggcatgagccaccgtgcccagcttggccttgttttcatacccagatggggagctgctgtcaccagattcacttcctgccagctgagaactcaccccaccaacaaaagtcttccaggttagctcatgtagaaaggcagggaagagcctgaggggctggtttggattacatgtccactcccagaccagtaatgtggtcaggaggctgggatgctcagattggccagatctgggccaggtgatcacctttatggggaaccaagggctgtagttgaccatcgagagaacttcctccaaagtaatatttgctagcagaagatagaggtggggatagaaagaatgatagcagcccagcctcttaaagaaaggatgagagtttagaaagggagatctgagctggctgcgttggtttattttttatttatttattttctgagacagagttttgctcttgttgcccaagctggagtgcgatggcgtgatcttggctcactgcaacctccacctcctgggttcaagcgattctgcctcagcctcccgagtagctgggattacaggcgcccaccaccacgcctggctaattttttgtatttgtagtagaaatggggtttcaccatgttagccaggctggtctcaaactcctgacctcaggcgatccgcctgccttggactcccaaagtgctgggattacaggggtgatgcattggtttatttattcattaattcatcaagcatttgagcacccacttcagtgcacactcagactagagaggggtccatcccaggccgggcagggcactctcagaccttacctcccacagccatcaccagcccctacgaaggagactttcctaggctcagaggcttcccctaccctgctgaatggtgttaagttctaattgttaaagaaaaagttattcaggctgggcgtggtggctcatgcctgtaatcccagcactttgagaggctgaggcaggcggatcatttgaggtcaggagtttgagaccagcctggccaacatgattaaaccctgtctccactaaaaatagaaatattagctgggcatggtggcatgtgccgtgatcccagctcctccagaggctgaggcaggaaaattgcttgaacccaggaagcggaagttgcagtgagctgagatctcgccactgtgctccagcctgggcgacagggagactccctctcaaaaaaaaaaaaaaaaccagaaaacaaaactgggcgcagtggctcacgcctgtaatcccagcactttgggagtctgaggcaggtggatcccctgaggtcgggagttcaagaccagcgtgaccaacatggagaaaccccgtctctactaaaaatacaaaattagccaagcatggtggcgcatgcctataatcgcagctacttgggaggctgaggcaggagaattgcttgaacctgggaagcagaggttgcagtgagccaagattgcatcattgcactccagcctgggcaacaagagcaaaactccatctcaaaaacaaaaacaaaaaactattcaatgacacttgtcaaagcacagtaatgaagactttattcaagaggtggcaagcactagttgtagggaccgtggcaatggggtcctgccctgaggcagaaaggttggactcaacttcaaatacagcaatgggcaagtgagaactgatagccaaggagcagagtggggtcagcgggtgcacaatgactaagaggatcatcaggcatttgtgggggattctggttaaatagtcctaacaggattcttgttgagggcaggccagggtaactagacatcatggaggatggcagaggataaggaggccgattagattttgagagtgatcagatgtggaggatgaggattctagctaaaccaacttagcacgatacttgctaaaattgaacaaggcagagatgaacacagaagtccaaaagttgagacctagttgaaaaagagctcagaaggccgggtgcagtggtccatgcttctaatccgaacactttgagaggccgaggtgggaggattgcttgagccccggagtttgagaccagcctaagcaacacagtgagacccagtatctacaaaaaagtaaaaagaatgcaacagggcacaatggcatgggcctgtagttgtagggatctgtgaggctgaggttggaggatggctcgagcccaggagttcgaggctacagtgagctatgatcatgccactgcactctagcctggacaacagagggagacactgtcttt

SEQ ID NO: 18868 - protein, 118 aa, Homo sapiens [sequence omitted]

SEQ ID NO: 18869 - DNA, 3598 bp, Homo sapiens
  CDS (834)..(1385)
aaggacagagatttccatctgttttgttcaatgctatgtctctagggcctagaacagagcctgggaccccataaggtgctgaataaataggggttcagtgaattcattaattacatttctgcaagatggggtggcatgttgtcatcttcagccattttttttttcttcgattgcattatatttggaacaggcacgatggtgacatctgtaatcccaactacttgggaggctgaggctagaggattccttgagcccaggaattcaaggctaaagtgtgctatgatcacacctgtgaatagcactgcactccagcctgggcaacacataagacctctctctttaaatgtaaaaaaaaaagtctgcgtgcagtggcttatgcctgtaatcccagcactttgggaggctgaggcaggtggatcacctgaggtcaggagttcaagaccagcctggcgaacacagtgaaaccctgtctctactacaaatataaaaaaaagaaaaaacattagctggatgtggtggtgcatgcctgtaatcccagctacttgggaggctgaggcaggagaatcgcttgaatctgggaggcagaggttgcagtgagccaagatcgcaccattgcactccagcctgggtgatagaatgagactctgtctcaaaaaaaaaaaaaaaaagaaaaaaagatttgatggagctgtctccaaaattaagaagaggatgaaaggagctgacccagacactcaagcagggctaattattccccttttacagatgtggaagactgaggcctgttgaaagtgcagagctcagccctggcaccctctgttcccaagagctccatgcaggtgccacaggatggagaagaccttgctggccaaccttggtaccacggcctcctgtcccgccagaaggctgaagctcttcttcagcaaaatggcgacttcctggttcgcgcctctgggtcccgtgggggcaaccccgtgatctcctgccgctggcggggcccagccctccattttgaggtgttccgtgtggccctgcgtccccggccaggccgacccacagccctctttcaactggaggatgagcaattccccagcataccggctctggttcacagttatatgacaggcaggcgcccactgtcccaggccacaggggctgtggtctccaggcctgtgacttggcaggggcctctgcgacgcagctttagcgaggacaccctgatggatggcccagctcggatagagcctctcagggcaaggaagtggagcaacagtcagcctgcagatttggcacatatggggcggtcaagagaagaccccgctgggatgggtaagtgtctgctagaatggcctgtggctcagggattggctctgccactcaccacctaagagatcttggtcaggtgcaggcacctcttcgagcctcaatttcttgctttagaaaatgatgacaatcacgatgacttaaaacatgcagggactttgtgggtgcttaaaatgtgtgtttacaaggctgagcgcggtggctcatgcctgtaatcccagcactttgggaggccgaggccggtggatcacttgaggtcaggaattcgagaccagccttgccaacatggtgaaaccccatctccactaaaaacacaaaattagccgagcgtggtggcacgcacctgtaatcccagctactctggaggctgcggcaggagaatcgcttgaacctgggaggtggaggttgcagtgagccgagatggcgctaccgcactccagactggatgacagaacaaaactccatctcaaaaaaaaaaaagtgtttacaattattccaaggagctgtacctgttctgaccacagcttaccttgctaacaacttctgctacgtaccctcctcatgctggtcacacagccctccttgcagttgttcgaaccctcaggcttttattcccgcctcggggcctttgcattttacatttccaccagtgacgggaacattctcattcccctaattttttcctgagtggctcctctccatccagggtaagttcctcaaagcagttgagtctgacggtcttacctaaaggaggactcacctgaatgccccctcatgccccttttttcccatccttctcccaaccccattcaacatgagccgtccctgcatcccaggccctgcacggagtgctaggatacatcaacaaaccagaaagagacaaagatccctgcccgatgggagccaacagtccacgagaggacaacaaaccatgaaccacaaaaataaggcaattttgtttgcttcaagatgaaaattaaaacacaggaagggaaggccaggcacagtggctcaggcctgtaatcccagcactttggaaggccaaggcgggcggatcacctaaagtcaggagttcgagaccagcctggccaacatggcgaaaccccgtctctactaaaactacaaaaattagccgggcgtggtggtacacacctgtaatcccagctactcgggagactcgggaggctgaggcacgagaattgcttgaacccgggaggcagaggttgccgtgagccaagattgcaccactgcactccagcctggacaacagagtgagactctgtctcaaaaaacaaacaaacaaacaaaaaacagtaagggaagggtgaggtggctcaggtctgtaatcctagcactttgggaggccaaggtgggcggatcacttgaggtcaggagttcgagaccagcctggccagcatggtgaaaacccatctctactaaaaaaaaaataaaataaaataaaatacaaaaattagccaggtgtagtggcatatgcctgtaatccaagctacttgggacagagtgagactgtctcaaaaaaaaaaaaaccgaaaaaacaaaaacaaaacaaaacaaaaaaaacagagtaagggagatagagactataaagatggagatgtatattgcaattttattttatttctatttatttatttatttttgagatagagttttgctcttgttgcccaggatggagtgcaatggcgtgataccggctcactgcaacctccacctcctgggttcaagtgattctcctgcctcagcctcccgagtagctgggattgcaggcatgtgcaccacgccctgctaattttgtatttttagtggagatggggtttccccatgttggtcaggctggtctcgaactcctgacctcaggtgatccacccacctcaacctcccaaagtgctgggattacaggcgtgagccattgtacccaagcaagcaattttaagtggtagtcaggaaaggccccattgcagaaaaaaataaaattgaaggaaatgagggagggaacaggtggataactgggggataagcaggcaggaggaagaggcagtgcaaaggctcttgggtcagaacaagaatttaagctgttcattcaaccaaaaaatgagtgggtagctgggtgtggtgttgcacgcctgtggtcctagccacttgggaggttgaagcaggaggactccttgaacccagaaagtcaaggctgcagtgagccgtgatcgcaccattgcactccagcctgggccacagagtgagaccctgactcaaattt

SEQ ID NO: 18870 - protein, 184 aa, Homo sapiens
MQVPQDGEDLAGQPWYHGLLSRQKAEALLQQNGDFLVRASGSRGGNPVISCRWRGPALHFEVFRVALRPRPGRPTALFQLEDEQFPSIPALVHSYMTGRRPLSQATGAVVSRPVTWQGPLRRSFSEDTLMDGPARIEPLRARKWSNSQPADLAHMGRSREDPAGMGKCLLEWPVAQGLALPLTT

SEQ ID NO: 18871 - DNA, 3738 bp, Homo sapiens
gaggctgaggcaggagaattgcttgaacctaggaggcagaggttgcagtgagccgagaccgtgcctttgcactccagcctgggcgacagagtgagactccatctcaaaaacaaaaaaccttggcaaaatactgcaaataaccccattaaaaagagggcaaaagaagccgggcacggtggctcacacctgtaatcccagcactttgggaggccaaggtgggtggatcacgaggtcaggagattgagaccatcctggctaacacggtgaaaccccatctctactaaaaatacaaaaaattagctggatgtggtggcggacgtctatagtcccagctacttgggaggctgaggcaggagaatggtgtgaacccaggaggcagagggtgcagtgagctgagattgtgccactgcactccagcctgggcgacacggcaagactctgtctcaaaaaaaaacaaacaaaacaaaacaaaacaaaacaaaaaacagaaggcaaaagagttgaagaaacatttcactgaagaggatgtatagatggcaaataagcatataaggagatatgtaacattattagctatcagggaaatgcaaattaaagccacagtgagagaactacctcaggatgactaaaataaaaagtagtgaaaatacgaaatactggtgactgtgcagggaaactatgctcatggattgctgataggaatgtgaaatggtacagccactctggaaaacagatctggcagttaccatcctgggtatttatcccagagaaatgaaaactactctgtatacgttagccaggcatggtgatgcgtgcctgtaatcccagctactccggaggctgaggcacaagaattgcttgaacccgggaggcagaggttgcagtgagccaagattgtgccactatattccagcatgggcaatagaccaagaccctgtctcaaaaaaataaaaaataacttatctgtacatgaatgttaatagtagctttattggtaatagccagaaactggaaacaaatcaggtgttttcaacagtgaatggttaaacaagctgtggtagatacccatggaatactactgagcaatagaaaaggaaccaactattggtacatgttgagtaccctttatctgaaatgctggggaccagaagtgttttggatttcagattttttcagattttggaatctttgcattatagttactggttcagcatttcttatccaaaagtctgaaatgcatttcctttgagtgccgtgtttgtgctcaaaaagtctcagattttggaggtactcaacctgtacatgcaacaacctggtagaacctgggttggggtagaaagccaatgtcaaaaggttgtatactgatttaattcagacaacactcttgaagttacaaaactgtagaaatagagaagagattggtggtttccagggcttaaggaagggattagggtaagggaggtgagtggatgtcaccctaaagggcagcccctcgggatcctggtggtgataggacagttctgtggctgtgtccacgtcagcatcctggtgaccctgtgatatagtgacacaggctcctaccatgggggaaagaaggcacgtgagacctctgtatttttacttccaactacacgtgactacacttatctcaaaatgaaaagtttaattaaaaagaaaaacctcggctgggcgtggtggctcatgcctataatcctagcactttggaaggccgaggcaggtgggtcacgaggtcaggagatcgagaccatcttggccaacatggtgaaaccctgtctctattaaaaatacaaaagttagctgggtatggtggcgggcgcctataatcccagctactcgggaagctgaggcaggagaatcattcgaacccgggaggcggagattgcagtgagccgagatcgtgccactgcactccggcctggtgacagagcgagactccgtctcaaaaaaaaaaaaagaaaaacctccccagacccctactggtgataggagaagacccaaaccaaacccttggtgtgtgttcttcctccccactgctccgtccacctctctagactcttgtgtttttgccacccgcatggcctcagtgttagtgacttgcccagtaacatagctctggagcctccacaccctgaggggctcctctaccctcaaaacacccagggccttgccttggggccttctgttggcctgctgggtgtgagtgggtgggttccggaagtggtagggccagggtaagaggtgcccatgatgggggcaggctgggccctatggagatagcccaacagagggagggtaaaaagcccacagaaggttcaggaccagaatcaagaaccatgtgtatttttctccccacatcatgagtttagtgtcagatattatttacaaacattttaaaagcagggtcagcaggcccggaggattgcatgtccagtgggagtgggggaggggtggaggccactgagggtgggtcagcggtccccagggttctgtggcttcttccagactggcttggaaaaaatgcttttattttcttggagttcccccatgcagatgttaactttaggggcaaaggaaagacaaaggctacatttcatttctgagtctatagatgtatccgctattgggaagaggttagaggtcaatgactaggacagtatgtcccatgagaatcgagggaggattcttgtctgtatgtgagtgggaagtggtgaagcctcacagcgttgtcaggcaggtgtggggtggtgattggccttgacagagtacccagccacccttcctcactgccctctcacgccatttctcctggtggctccacacaggtgtatgcccacgcaggcgcgacgctggaggggaagatgtatatcacctgcggccgcagaggggaggattacctgaaagagacacactgctacgatccaggcagcaacacttggcacacactggctgatgggcctgtgcggcgcgcctggcacggcatggcaaccctcctcaacaagctgtatgtgatcgggggcagcaacaacgatgccggatacaggagggacgtgcaccaggtgagtggggcccggggcagtccacacccgtcatcattccgaagcctctcagttgttattgatggaaaatgtaattgaatcatgtgccttttaaaaatagactattttttagagcagttttaggttcacagcaaaattaagtggaaggtacagtttccatacacccccttttccccccatacacatatagcctccccactgcagacctctcgctccagaggggtggatgtgtcacagttgttgaaactgcattgatccatcaccatcaaccagagtccacagtgttcactcttggcacattctataggtttggacaaatgtcaccatgacagtatcacacacatacacatctacctttgcttattactcttaaaaacttttaggccggatgtggtggcacatgcctgtaatccaagcagtttgggaagccaaggcgagaggatcacttgagctcaggagcttgagaccagcctgggcatcatggcaaaaccccatctctacaaaaatacaaaaattagccaggtgtggttgcatgcctgtactctcagctacttgggaggctgaggttgggggatggctggagcccaggaggcagaggtttcagtaagctgagatcacgccactgcactccagcctgggcgacagagccaggccttgtctc

SEQ ID NO: 18872 - DNA, 3819 bp, Homo sapiens
cgaactaattatttagataattaagtggctgggcacagtggctcatgcctgtaatcgcagcatgttgggaggctgaggtgggcagatcacttaagcccaggagttggagaccagcctaggtaacatagaccttgtcttcacaaaaaaaaaaaaaaaaaaaaaaaaaaaaaaagaaaaaaagttagggcatggtcacatgcctgtagtcctagctactctgaaggctgaggcaggaggaccacttgagccaaggagttcgtggttatagtgggctatgatcaactactgcactcaagcctggacagcagagcaacaccctctcttaaagaaaaaaaaagataattaagctacaagccacatttatttgaaacattctccgtggatgatctgggtatttgattttgaatccttcaagtaaatttctcagttccttaacgtgcatatgtaaacgatcatgagtcatctttggttattaaaaataacccaaaccacagtgattgaagccttgacatgctttctttttcttggtgagattttcctggattgtcagctcctccccccttcctccccgtacgtgctttcagtgagacggaacagttcatttcttccttgactacaattgaataaacatttcgtaatgacattaaaaagtattgacttttgtgtcataagtaccagcatttgcagcattttctgactgcatcgttgcacttatgttttctcaatttgtaggtcctgctgccgtgaccagccagtctcctgttccatgtaaactctgtatcctttactaaggtgtggcaccgtgcacaacagggcaagtggtcaccctcagagagtggtcctgaagtcctcctccgggcagctgtgaataacactccgagagccaccccgcaggcagcttccctgactgtccaggggcctcgcgtttagcgtggactcagtacatggtgggcaggggcgagtgctagcggaaactgggtttgctttttgttttcatcttttcctggtttagaatttcctataacatgtggattcttcatcttggattgtctttcaacctgacatcattatcagcgcaagccaaggtaggtcagcggggacagttgtcgtgttacaacatggtgcttgttgactttggatcccagttgtagccagggacgttttcaaggtgaatctcttagaaatgacccctcctttcaagcgtgggaatgggatttttttttttcactttatacgttttttactatatgtgcattttatcaagaacatatactacttttaataattaaagcaacaactaagaatgccattctcctgcttaagcccattctggaaaagccagactccaccccagggtggatggaaagccggactccaccccagggtgtctccctcatttctcccatcgaccttcccaccggtgtccgtgcccttttctgttctgcatgagcccgggaggtgtgctcctctttctggccttgctgaggaagcctcctcagtctgttaattgtctcttcctgggtaatttctttattagagaaatctttttttttttttttgagacggagttttgctcgttgcccaggctggagtgcaatggcgtgatcttggctcactgcaacctccgcctcccgggttcaagcgattctcctgcctcagcctcctgaatagctgggattacaggcatgtgccaccacgcccagctaattttgtatttttagtagagacgaggtttttcatgttggtcaggctggtctcaaactcccaacctcaggtgatccgcctgcctcggcctcccgaagtgctgggattacaggcatgagccactgtgcccggcctaaagaaatcttatttttttaaggcagggtcttgctccgtcacccagcctggagtgcagtagtgctatctcagcttactgcagccttgagctcctgggctcaggcgatcctcctgcttcagcctcccaagtagctgggcatacaggcgcacatcaccacgcccagttaatttattataataataataataattattttgagacggaatctcgctttgtcaccaggctggagtgcagtggtgccatctcggctcactgcaacctccaactcctgggtttaagcgattctcctgcctcagcctccccagtagctgggattacaggcatgcgccaccacacccagctaatttttgtatttttagtagatacggggtttcaccatgttggccaggatggtctcgatctcctgacctcgtgatctgcccacctcagcctcccaaagtgctgggattacaggtgtgagccaccacagccggcctataatttttttttttttgtagagacagggtcttgccatgttgcccctgtgtctctaatacctcgccaggctggttattagagaatctcctatgttactctttaatcctctgtgtattttcctgcctttcctctggaattcctaagaactcttgaggagagaattagccctgatgctgtaggcatccactgtatgtaatgcattgttgtgccttgtctgtaacccatagcctcatgtgacatccactgtatgtatgtaatgaagtcatttctctcctgtgcatctcgctggtgttttcctgtacagctgctctgtacctgccttgggccaactgaaaagggggtcacccagatgattttttatgtggcacttcattctcctgtggcatcccaattgggaaaggccacaccagatgctggcagtgtgggtgatcagtacatttatgggtcgatgaatggatgagttatgatgttccattgagagcctctggagttaccttttaaactaatgagctgttgtaggagaaaccaaagcacaggactgaagttgatgccacgtgttgacatctttttctattttaaacgttaaaagaggggctaggtctagggaagtccccgtttggaatgaaggactaggagctacacctttgatgtgcccctgaatgcagaggttacttggaaaagagtcagccaggtgtgcggtggttgggctgtcatcctcctgtggtagacacgctcctgaattgctcctgaatggctcagctctgctttggttaggaaggaaaagctacactgactgtactttgcggctttttatcaccacctgccacccgccccgcagatgtttaggggaaccacttttgggcttttgttacggtttgcatcatactgttttatttgctgcctcttaaaatccaggttacctctggaacctccaagtgaaacttgagcccatagtaaatctcttaccagacaaaggaagactcatggactttctcctccagagaaaggaatgcaagatggtcatcctgtctgtctgttcacagagtaagttgaatccttcccccttgctctgattccagtgtgaggcctgtgctgcccaacactttttatcgggatgtgggctacattgttgtgtcttgtctgtgacccacagcctcattctttatgtgaggggtggctatgtgaccccctaggaaaggctgctaaatggaaagatgatttgtagagatactggtagaaaagaacaataaatgggatggttctgaatgaaagtgggcacacaggaggggagtgggccaccacccctggccttcacacacacctctttcaaaatccaagccactcactgcatatgtgtcttctttaagaatcccctactgaggccaggcatggtggctcatgcttataatcccagcactctgggaggctgaagcaggaggattgcctgagcctaggagttcgagaccagcctggacgacaacatggcaaaaccctgtctctac

SEQ ID NO: 18873 - DNA, 4964 bp, Homo sapiens
  CDS (73)..(411)
atcagcctcctgagagctgggactacaggcgcctgccaccacatccggttaatttttgtatttttagtagagatggggttttgccatgttggccaggctggtcttgaactcctgagctcaggtgatctgcccacctcggcctcccaaagttctgggattacaggcgtgagccacggtgcccagcctggctcctgttttttgagacggggtttcaccctgtttcccaggttggagtatagtggtgccgtcatgacttactgcagccttgaactctttggctcaagcagtcctccccactcagcctctctagtagctggggctccaggcatgaatcaccgtgccagactaagtttttttaaaattttttgtagagagaatctctctctgttgcacaggctattcttgaactcctaggctcaagtgatcctcctgcttcagcctccgaaagtgctgggattacggttgtgagtcactgtgcctggctcttttaatcttgaaaactctgggaagagctcacttctgtttaggaggctgccttgggaactgcatctcctgggctggtgctctgtgctgcttggagtctgcagaccctatctgggtcgcttggcctcccgtgcacaagctgccagaatggaggccccattctcaatgtgggggctgcccaaagagcagggagcttcccacaggacagaggctgggcacctgcttggcctggttcttccttttcccagggctccaacacccaccccctcaggtcctcccaaaccctgcaggtccctggcctggtccgtccacacctacactcaggaatctctacacatctctgagttgctgcatctgtcttcaggcacagcccaccagcccccctgggtacccaaagacaccgcaaatatcagccattccagacaacgtcctcccgtgtccctatctcatggagtaatgcctctaattcagccacaccaagaccccacgctccacatcccctagaactctcatctcctgtggcccaacatggcccttcctttcagcagtgggatgtgggaaggatcaaggtcacccttgtccaaatcccatgcagacaacggtgttggagtcttgggcccaaagaccagctcctagaacctgcagggaagcaacggcacgttccatctctccccatgccactgaggaatcattggtggcaggattctcagcaggcatggccgtgggtgcacagaacagagaaaggatggcctggaccacacacatcactgtgtgcagatgctttcctagacactgcagccaaggacacagaggctcagagagaataacctccatctcctgggtcccagcgattctcctgcctcagcctcttcctatttcacatgtagggaaactgaagcccaggtaggcaagcctgacttgctggagtcacacaggaagttggcagctctgctccatccctgggatctggagcccctgctctggggaaggagaggtggggcgctgccttccagagtcccctcaagctggcagggacggctgtacccccagggtcagaggagaactaaaaggagcggaagctggcctgggtccagggagagacctcgtgtttgcccaaaagggagctggagaggggcagctgggcccatatgcagggaggagctgcagggagctggtggcggggcagcaaagagaagtggatttggtgggtagaggggcccctccttggttctagtcctccccgcagccccttgcaaacaggcggggctctcctgtccttctctcctgcagcaagccctacatgaagaggcctctttggtgagtggcagctcaacctctgctaaatgcctccagtgatggggagttcactaccttccaaagtttttaaaagatgttaaccactgctattcaagaacaattctagaattttttttttttttttgaaagacaaggtctcattctgtctcgcaggccagagtgcagtggtgtgatcatagctcactgcagctttgacttcctgggctcaagcaatcctccctcctcagcctcctgagtacctgagactacagatgtgcaccaccacactggctcattgttttcattttttgtagagacgggatctcactatgttgcccaggctggtctcctggcttcaagcaatcctcctgccttggcctcccaaggtgctgggattacaggcgtgagccactgcatctggccttttttttttttggagatagagtctcgctctgtcgcccagggtggagtgcagtggcgtgatctcggctcattgcaacctccgccttccgggttcacaccattctcctgcctcagcctcccgagtagctgggattacaggcatctgccaaccatgcctggctaatttttgtattttttggtggagacggggtctcaccatgttggctaggctggtttcgaactcccgacctcaggtgatctacccgcctcagcctcccaaagtcctgggattacaggctgagccaccgcgaccggccctgctgttgcttctgaggtttgaaaaccgctgcctcaatgctcctgattcagctcttcttacccaaaggttcccccacctcatctactctgttcctgcacagtcgcccttttctctgatgccccgggcaggtttctctctgccagctccacgcttctggagtcccccatccgtcttggggcccagctgcccactgtctgggttcagaccttctcaacactccctggcttctctgccctagttttgccttctccaatccactcttggtgggtggaagtacggttaccatggtaacttgaagacaacgcaaatctgattgtatcattacaatgactgggaaaacctccagtgccacaaaataaagctcaagtcactagcttagcagtccaggccctttaccattccggcagcatttctgggggctattctccttccccccactgcacaaccccgcctggccaccccaggctcaggctgcagaacagcgtagaccagggagtggctttggggtcatgctaactacctggtttttgtctctttctggctgtttgctcagttgcaaaatgggaaggacaacagcacccgcctcacaggctaagaggctgtgtgtgaaaagcccgcagcacaggatctggcacgcgtggacgtgcgggatgggaggaggggatttcccagctcctcatctctgcagggactggccttggcctagggaacactagctgtccagggagggggagctttccctgagccccccgatgtgtggcaggcagaggagagcaagctacttctgggaggggagttgtggggaagggcaagttagtctttactgagggtggcagtgagctggcactttggtctcacctcggctgcagaaacccaccctgctcccgtcttatttcctggggatttcagctgtgtgcaggcacagatgcatctccgaagtgcctcatgcttgccttgatctcctctccttcctctggccagtcctgaacctcttggtgatccacggcggcacctctgtgtcctacatccttctctggccatctccttccctccttccagccctccctctaggaccctgaccccaaccatccttcatccccatggggacattcagtccactgactcatcaccctcccctgtccctctgtgagagaaggagcaggcagagaggatcttgcaagagccttcagcaactctcttccacccatcctgttgcttgctgctttttttttttttttttttccaaaaaaatagagatggggtcttgctatgtggctggtctcaaactcctgggctcaagtgatcctcctgcctcggcctcccaaagtgctggattacaggcgtgagccaccacacccggctccgttccctttctaagcagggtgctccttttcttgccatttcccccatcctccttcctctcccacagctcacttccctctctactgaatctgctgaagatcatgcagctgctgttcctgcctctaaaaccctctcttggctgggtgtggtgggtgacatatgtaatcccagcactttgggaggctgaggcaggagaatcacttgaacccgggaggcggaggttgcagtgagccgagattgcgccactgcagtccagcctaggtgatagagcaagactctgtcccctccctccaccaaaaaaataaagccctctctgcatccattccactctccactcttgctcattctctcctgccctctaaaaggtgatctgtctttggcagattcaatcacttgcctttctcattctctcctgagcccactattccactctggtccccaccacttcccccaaaactgctttgaaccatcgcactgcaacctgttgcttagcccctccatctagtctcaggcgttaggactgactgcccagcagaggctggtgcaaccaatcacctcctttagtaagtttctccctgggcttcacctcttcacctgtgggctttccacctgtctctctctttttttttttaagacagtctcctctgttgccaggctggaatgccgtggcgcagtctcggctcactgcaacctctacctcctgggttcaagcgattctcctgcctcaggctcccaagtagctgggattgcaggtgcccgccaccacaccgggctaatttttgtatttttagtagagtcggggtttcaccatgttgcccaggctggtctcgaactcctgaccttacgtgatcctcacgcctgtaatcccagcactgtgggaggctgagacgggcagatcaccctggccagcatggcaaaaccccatctctactaaaaatacagcaattagccgagtgtggtggcgggcacctgtaatcccaactactcaagaggttgagacaggagaactgcttgaacccggaaggcagaggttgcagtgagccgaaatcgcgccattacactccagcctgggtgacgagcgaaactccgtctccaaaaaaac

SEQ ID NO: 18874 - protein, 113 aa, Homo sapiens
MGFCHVGQAGLELLSSGDLPTSASQSSGITGVSHGAQPGSCFLRRGFTLFPRLEYSGAVMTYCSLELFGSSSPPHSASLVAGAPGMNHRARLSFFKIFCRENLSLLHRLFLNS

SEQ ID NO: 18875 - DNA, 3917 bp, Homo sapiens
  CDS (407)..(766)
gatgacaggttcttggagacccagctgtgtgctgtgttgatgggcaaacatgaggtgggccccaggggaaaggagctgttctggactctgtgaatgctgctgctcccaagggcggtgcccaggtgagatgcctgcgggggaagcagcaggagctaccacctccacccagccactgcattctggagcagcgcttcccaaacttcagtgtgtgcaccgatcacctagggccttttttttttttttcctttttgtggagaacgggtctcgctagattgcccaggcaggtctcaaactcctgggctcaagccatcctcctgcctctgcctccctaagagttgggattaccggcttgagccactgtgcctggcttgtttgttttgtattaattacatttttatagagagagatggggtcttactttgttgcccgggctggttgcaaactcctgggcctcaagggaacctcccatttcagcctcccaaagtgccggaattgcaggcgtgagccactgcctggcttgttttttttgttttttgtttttttttttctgagacggagtcttgctctgtcgcccaggctggagtgcagtggtgcgatcgtggctcactgcaagctcggcctcccgggttcgctccattctcctgcctcagcctcccaagtagctgggactataggcacctgccataacacccggataattttttgtattttagtagagacggggtttcaccgtgttagccaggatggtgtcgatctcctgaccttgtgatctgcccacctcggcctcctgagtaccttgttaaacacccaagtctaggccccatcctagacctacagaatcagaattcctagtgttaggctgggtgcagtggctcgcacctgtggtctcagcactttgggaggctcaagtgggaggatcatttgagcccaggagttcgagaccagcctgggcaacatagtgaaaccctctctacaaaaaatttaaaacttagctgggtggtgcatgcctgtggtcccagctccttgggatgctgaggtgggaggatcgcctgagcctgggaggttgcggctacagtgagctgtgatcatgctactgcactccagcctgggcgagagcaagatctcttctcttaaataaatttaaaaaaagaatccctgggccaggtgtggtggctcatgcctgtaatcacttttgggagcccaaggtaggtggatcacctgagatcaggagttcaagaccagcttggccaacacggtgaaacccccatctctaaaaatataaaaaaaattagctggacatggtggcctgcagtgcaatcccagctactctggaggctgaggcagggagaatcgcttaaacccgggagctggaggttgtagtgagccgagatcacgccattgcactccatcctgggcgacagagtgagactctgtctcaaaaaaaaaaaaaaaaggaatccgtggtgtagtccgagcgcggtggctcacgcctgtaatcccagcattttgggaagctgaggcaggcagatcccttgaggtcaggagttcgagaccagcctggccaacatggcgaaaccccatctctactaaaaatacaaaaattagccaggtgtggtggcacatgcctgtaattccagttactcaggaggctgaggcaggagaattgcttgaacccaggaggcggaagtagtggtgagctgagatcataccactgcactccagcctgggtgacagagggagactctgttgcaaaaaaaaaaaagaatccctgatgatagaacctgagaatctgtagttaagaggctccccgggtggtcatgcaaaccagtgtgtgggaagcagtgttgagagtgcctcagagaagctcgttccatgaaaattgtgtgcagaccccagggccccattttcagaggattatgcagcttgacctgcaggaagccactgctgatgcctgttgagtggctgcctggggatgggcactgcccgatgacgggcaggaggaccactacctacacctggctgtcctacagtagttttcaggtgtctgtgcctggcaccagccaccagcagtatccctgcgtctggccctggtcctctaggagcggaaggggagaagggcactgccgtgggagagagacctgccatttagattacatttggctttgagggttgaatggtgtgtttgcaaagccaggaatgatcatgagctctgtctgctcccataggcccatcaaatggctccagacatgttctactgcatgaagctcctggaggagactggcatctgtgtcgtgcccggcagtggctttgggcagagggaaggcacttaccacttcaggtatgacttcctctccgcactaggggctggtccgggtcttgtccagggaaatgtggacttcttgacatggagcagaggactacttcaaagagagaggtgcggagaccctgtcctctctcgagtcacccctactctgtcctgctgcagacccaagctcagaccctgcccagggattaagaaaatctgggtggttgtctgctcagggttatattccctgaaaggtcttccttgactattctgtctctcccctctgccatcggtcccatcgctgtctgaaatgttcctaatagggtgttttcttattttgctgtccgttttcaactctgcgatggcagcacacagctgccagtgcctggagtggtgctggcatgtgcttagtagctcctggcagcaccctgggccatggcactgcctgtgatcccagagcctgccgaggaactgcaggggaatttgctccactcatgcccagggcataccccgttctggccctgcatggatgggaatgccggtgcccagagctgagctggctggagcagaggttttccactgaggccagttctcttcagaacaacatcttccccatacatgttgctctcagaggtctcctgcggcagatgctaaaaaaaagaaatggcatgagctgttagcacccggagccaagtcttgacttaggcaaggttgtgggttgtgtcccctgatggacaaaccttgtccggttggccttcccacccctggtcaggctcatctcggtggttgatggcttgatgagaaagtgatttaagcaagagggctgccaggaaggccagggagcattttggtgcaccagagggaggtgttagttactgtggcaacttggaaattcctttggagcagagttgtgactggagggtgtctcactgtcagactgactagagataaaaaaggcccctcaggtaggagtgaaatctctctctcaaactctaggaaagcccgagtcatactctagagaaagttctgatcagtggtcaaaatgttccagagggctgagtgcagtggctcacacgctttgggaggccaaattcaggatggcttgagtccaggagttcaagaccagcctgggcaacatagcaagaccctgtctctacaaaaaattgtttaaaaactagccagggatgttggcgcatgcccgtaatcctagctactcgggaggctgagatgggaggatcacctgagcccaagagtttgaggctgcagtgagctatgatcactctactgcattcaagctggggcagcagagtgagaccctatctccaaaaaaaaaaatatggccaggtgcagtggctcatgcctgtaatcccagcactttgggaggccaaggtgagcagatcatgaggtcaggagttcgagaccagcctggtcaacatggtgaaaccccgtctcttctaaaaatacaaaaattagctgggcgtggtggcaggcatctgtaatcccagctactcgggaggctgaggcaggacaattgtttgaacctgggaggtggaggttgcagtgttcgcgcaattgcactccagcctgggcaacaagagcaaaattccatctc

SEQ ID NO: 18876 - protein, 120 aa, Homo sapiens
MGSYFVARAGCKLLGLKGTSHFSLPKCRNCRREPLPGLFFLFFVFFFLRRSLALSPRLECSGAIVAHCKLGLPGSLHSPASASQVAGTIGTCHNTRIIFCILVETGFHRVSQDGVDLLTL

SEQ ID NO: 18877 - DNA, 4457 bp, Homo sapiens
cagcaccaggctgtggcaggttgggttttgctctgtgctgtgatttctgttggagttggaaagttggctgtgagtcggcccagatgtgaagcggaaacggggaggagggaggtgagtgggcctggctgggtggatggggatctgctcgcctgcacggtttcctctttggtaaagtggggcctgcactcgccccatctagacaggcatgtggggactgaggtgattgattcccagcgtggaggagcatctcgctcagtgccaggcggaccatggcctggaggtggccggcattttcccttctcctgaggggatttattgatcttgtgctgcaggtggtgtggcctgagggcaggtgtggcttgcagagctcatcactggggcaggtgcagggctctggggtgctgagctgtcactggcgaagggcctcaggtcccccccaacagctcccacctgctcagccacagcgtggatgcgtcccgggctccccggccccgggggataccataagcacagaggtggcctctttaatcaggggcttcccagggagggtctgaggctgggctgcgggattactccttccttgggaagcaggcaggggtggccaggcacagtggctcacgccagtgatctcagccccttgagaggctaaggcggatggatcgcttgagtccaggagttcaagaccagcctaggcaacatagtgagctcccgtctctacaaaaaatacaacaacaacaaccaaaaattaactggtggtgaaaaaattataaaaaattatggcagtgagtgcccgtggtcccagctactcaggaggctgaggcaggaggatcccttgagctaggaggtcgaggctgaagtgtgagccatgatcctgccactgcactctagcctgagcagcagagcgagaacctgtctctaaaaatggaagagaagcaagcggggggacctgtgtggtgaccctggggttgtgccccgccgagcaaaaccaagatgggtcagcagtccctggacttggagcatccacgtggctctgctaggcagtggaggggccccgtggtggagcagcgctggcccgggaagcgtgtgtcactaggcttgtgatcagacggctgcctgcatccctgagagttgctgaatttagggagttgtggggcagaaagagcggtggcttcacccacagagtccagggttcgagacccggccgatccacccacagagtccagggttcgagccccagccgatccacccactagctctgtggcgtgagacactgctgtagaatcagtcataatcatctgagccacgatctcacccagggcgatctaatcttaacccaaagggacactgggtgatgtctgggcacatctgtggttgtcataacttgggggagctcctggcagggaggggcggcggccagggatgccgctcagcaccttgcagtgcccctgacggccccaccccagagaacgatccaaccccgatgtccacagagccaggggttagaggcctggttttctgggccctggttttctcatctgtaaagtggagacagggtttttgtcccaggcagatgaaaagttcaagttcctagttgggtgttaaccctggtggcaggaagtgacgatggtggctaagggccccaggatgggctggggaagttcaggcctttctggtcactgcagcgtgggtgggactcaagtcctcctgccacctgtgcccaggctgccctgagcagtgtcccccagccggtcctcaccaggggctcccttgtgacaaaccattgaccctggaccttcttatggtgcagactctgtcgtcactgcgttcacagtgggcaccgtgttgtgttgtgttgtgtttttgagacggagtcttgctctctcacccaggctggagtacagaggcccgaccttggctcactgcaacctctgcctcccaggttcaagcgattctcctgcctcagcctcccaagtagccggaatttcaggcatgcaccatcacgcctgtaatcccaacactttgggaggccaaggtgggcggatcacgaggtcaggagatcgataccatcctgactaacacggtgaaaccccgtctctactaaaaattcaaaaattagctgagcacggttgcaggcagctgtaatcccagctactcgggaggctgaggcaggagaatggcgtgaacccagtaggcggaggttgcagtgagacgagatcgcgccactgcactccagcctgggcaacagagcgagactccgtcttaaaaaaaaaaataacgtatttgtatcattgctatgtttaatgtcgtatttcattgaccataagtcccacagggaaggaggaagttgttacttcctgtgtggggctggggccagggtctccccctgggtattgagtcattctctggggtggagtgtcctgggcactgcagggtgctgagtagcgttcctggcctccacccactccatgccaggagttcccccaaaacctgacaaccacagatgtccccagacatcgtccggtgttgaggggcagaatcttcaccgtgttcaggcctgtgggggcagggggcagggtggtctatccctgactcagcccgccaacatcctctgggccacgaggcaaatgagaagaaaaaggaagtggtcgggggtgtgagccactccaagcacagacaattcccaccggggacaaagggatgggctgagctgggacacctgggtggggagtcgcaccctacgtgccctggagaaccaaggcagcctgagtcaccatgccagctctgccgggctgcagatgctggtttcagaagcgcctggcagctgcggagctctggggatgcggacttggctgggctaagatggatcgggtatcggggcccccagaatcccctcagtggagtccctggtagattagatcagaggggaagctgccaatctagctgaggtcttgccccagggcagttttgcccccaggggacttggaaatacggggcagtgcggggggtgcatttgtgtttgtcacaactagaggaggggctgcccctggcatggagtgggtggaggccagggacattgctcagcacctgcagtgcccaggacaaactcacccagagaaggatccagccctgaatgccaagtgggggactgcatttgttatttgggaaaaaaaaatcaagtctgctccctgctcacaccagacaccagaataaactcccaatatggcagacggtgtaaaccaggggacctcagctcctgggattctcttcctctccccctctgtggatttcaatgtgtgtagcctcctgggacctcagcagagcagaggatcatgggccacggagtctcttgggggtccgtggaatcccctaacccaagaggtgtcaattgagggtaattctgcccccaggggacactgggccaagtctgggacatttgtgtttttctcatgactgggggtgctcctggcatggagtgggtggaggccagggacgctgctcagcaccctgcagtgcccaggatggcccctccccagagagtgacccacgccgatgtccacagtgcagagagtggaaacgctgccctagtggcagacgcagcagattcagaattgaaggatctgagttcaagcccagacttgtaccttttacctcccaccctcaggcgaggcaactggcctcagcttctggacgtgcagcacgggtgagcccctcccgccagccaggaaatgatgagtttcacgagagcaggtcctccagggccccagcaaatgccaggcctgtttactaatgacagcaaaggtccaccatcacttagcaggaatgagagcattcgctttcagcccgccctgccagcctcacagggctgcggcatgaacccctgtagggttagtttatgagtgcgtagggaagtgctccccagaaagcaggagaaacacggatggccagatacacgtttgagcctctgacaactacagtcactgtgtactaactagtggtgaggttggcaatttgtaaaatttactcattaaagagggagacagagccaggctccgtgcctcatgtctataatcccagcactttgggaggccaaggtgggaggactgctcgaggtcaggagtttaagaccagcccggacaacatagcaagacccccgtctctacaaaaaatacaaaaattgccgggtgtggtggctcatgcctgtaatcccagcactttgggaggtcgaggcgggcggatcatgaggtcaggagttggagaccagcctggccaatatggtgaaaccctgtctctactaaaaatacaaaaaaaattagctgggtgtggtggtgcgcacctgtagtcccagctactcaggaggctgaggcagaagaatccttgaacccgtgaggcggaggttgcagtgagccaagatcgcaccactgcactccaacctgggcaacacagcgggaccccatctc

SEQ ID NO: 18878 - DNA, 4144 bp, Homo sapiens
  CDS (3704)..(4120)
agcaatttgggaggtggaggaggagcaggaggaggaaaaggaaacaaccaggccagtcatggtgtctcgtgcctacgaggaggaggaagcggaggaggggaaaaaaaggaggagcgaaaagaaacggagcagaaggagttggaggaggaggaggtggaggaggaggagggaaaagaaatggagcagcaggaggagggaaaagaaatggaagaggaggagcaggaggaaaatgaaatggaggaggaggaggaggaaaaagaaatggaggaggaaaaagaaacaggaggaggaaaaagaaacggaggaggaagaggaggaggaggacaaagaaacagccaggccggacgtggtggctcacccctgtagtcccagctgctcgggaggctgaggcagaagaatcgcttcaacccgggaggcagagtttgcgtgagccgagatcgtgccactgcactccagcctggagacagagtgagactccatctcatctcaaaaaaaacaaaagaaaacaaaacaaaaacaaaaaaacagccaggagccgtggctcacgcctgtaatcctagcaatttgggaggcgataagaattattgaaatgcagtaagaattaccgaaatgttgaacaaagacaccaagtgagcacgtgctgttggaaaaatagcaccaatactacactagctcaacacaaggttgccacaatcctgtaatatattaaaaattgggccaggcaaggggccgggaggggtggctcacacctgtaatctcagcactttgggaggccaaggcaggcggatcacctgaggtcaggagctccagaccagcctggccaacatggtaaaaccccatctctactaaaaatacaaaaattggctgggggtgatggtgggtgcctgtaatcctagctactatgtaggctgaggcaggagaaccacttgaacccgggtggtggaggttgcagtgagccaagatcgtgccatggcactccagcctgggtgacaagagcaaaacttcatctcaaaaaaaaagaaaagaaaagaaaagaaatgggccaggcgggctgggtgcagtggctcatgcctgtaattccagcacctttgggaggctgagatgggtggatcacgaggtcggaagtttgagaccagcctggccaacatggtgaaaccgcatctctactgaaaatggaaaaattatcctggcgtggtggcgagcgcttgtagtcccggctactcgggaggttgaggcaggagaattgcttgagcctgggaggtggaggttgtagtgagtgaagatcttgccactgcactctagcctgggcaacagccagactctgttttaaaacaaacaaaccaacacaaacaaacaaaaacaaaccccaaaaccaaaattgatatttcccgtgtacattcgaccttgactgttgctcattcaacccagcccaactcagtgccctatcccctggccctgaagagaccattctggcccagaagtgtcctggctcggagcagcaccttctgctaccacactgggcctcccttctcctcagtgcccaaggggaggcacctcactctgatctcccagtggcatcctattatgcctgccagtaaggataggcgcttggtcctagagcagagtggtctgccgttggaccagcccagcactccaggtgacctcagcctgccccaggccttcctgtaggttggcactaattggtttggctgcagccttgcatatttagcagtttttattactaataacccaggcagggtggcccaggaccccgctgggggaggtactgccaggctcccagctgaggggcaggctggctccaattctgactggctggccccagtgatcagaaagatccaggccccacctagtgctttgctagagatctaggcttggtggggcagcttgtggggtaaggggcaggaccagctcaaaagacggggtgggggcggaggctccctctgcagggcagagtcctttggcagctggggctgttgggcatggaggggtcagttgacagctcagggccagagcacggtagaggtctctgggtgcacacaagaaccaggagtggagctgaaacatgtcctgtcccctgcctgccctcccttagtaactgctggcatttcccaattccttcctgagcaccaggcaccatgttatgcatgcaatttgcaaatgttacctgattgaatgctcaaaacaaggctatcacataggtactgtgttatttttcagaggatgtcttgctctgtcacccaggctggagtgcagtggtgccatctctgttcactgcaacctccacctccagggttcaggtgaatctcctgcttcagactttcaagtagctgggactatagctgcccgccactgcgcctggctagtttttgtattttcagtggagacagggtttccccgtgttggccgggctggtctcgaactcctgacctcaagggatccgcccatctgggcctcccaaccctgagtttttataataggccccaggccaggtggttaacagaggtctggggcattgcagggggacagaggaggacatatgtccctattggccgttgtagagtcccttccacaaaaaggatgtcagtcaagtgacgtgcccacctccaccccaccctccccccagtcctgggtactaggactacttcccaggtgccctgtacccttccccgatctgtcccatgccctggcctctgcccgctttcaaaacatagatgtggccagcgccttggcttatgcctataatcccagcactttcggaagcagaaggattgcttgagcccaggagttcaagaccagcctgggcaacatagatcctgtctcaacatattttctgcaaaatttttgtttttcctagacagggtctccagcctgggcgaccaagtgagactccatgtctcaaaaataagaacaaaacgtagatgcctacgtaccatctctctacccttggctcctggggagtaaggggtcacccagtgacctcctagaaggccagtgacaatggggggtgtcagagtgctcctcagagccaagggagcagtaggaattgggatcttagtctcttagtctgactccaagctgtgagggagagagttgcagggcacttaagcttggtggagaccgtcagtgcctccttgcctgtccctgcagcaaaagttcaggacaccagagccaagctcagaggccgtggtggaacaggggtgaagagcatgggttctgacttcagactgctgggctgcagccctggctctccctcccctggtaagggcaggctgcatgcctccctgtgcctcagtttccccccttcatagtgggattgtattggtgcctaccccagagagttgtgtcatcaattaggatggcacctggcaccttggtcagtggcaggaaaggatccagaagctctgctctggtcccggggtgcctcgggccctgccaccatctccttggggtggtgccatgtggtgggaaagaccccaacttcaaagccagacgcagtggctcatgcccataatcccagcactttcagaggctgagatgggaggatcacctgaggtcgggagttcgagaccagcctggccaacatggtcaaaccctgtctgtactgatgatccaaaaattggccaggtgtggtggtgcgtgtctgtagtcccagctactcgggaggctgaggcaggagagtctcatgaacccgggaggcggaggttgcagtgggccgaggttgcactactgcagtccagcctggctctgtcttggtgttcagccatgttcccatgctcactcccaaggtgactctgggaaggtctcagcctttttgtcttcccagttaggatggtcccatgcccctgttaccatcagacttggtaagtttcccgaggagactctgcaagaggcactgttctggatggtggaggagagactagttgttctgctctcctggccacagtgggtgcagtggaccccatcatggagaaattcaacacatccagcctacgaccagcacctgtgggaggtggatattcaaggcagcagagcctacagccggggcatggagaaggcagggctcctcgccaaggccgagatggatggttttacgttgaactaattatatactcaagtgctgttt

SEQ ID NO: 18879 - protein, 139 aa, Homo sapiens [sequence omitted]

SEQ ID NO: 18880 - DNA, 4372 bp, Homo sapiens
tgtggtgactctaaccataacagcctgagacagaggtcccaggagatccctccttgtggaaaagcagtagttctcttccccagaaaggactggggtcaaaggatgcacaacagtaacgactttgtggtgaggttggcagagaatatacgatggggagcttgatgtgtgagaagtggaaagaaggtcatcttggatgattggaggacaacatcccgcaaacgacaacagggaaagcacagtacttttacaaaaggctccgcaaatatctcatccttaccatctgttccttgtgccttataagatttttggatttcatcctaagagtaacacgcatttatggggagactgagggataggactgggtaaatttgagatatatctccaaaaaccatcttcattttaccaaagagaaaaatgaagcccagagaggttaagtgacttgcccaggatcatacagctaatgagtagtcaggaaaatattctctttagagttctttgtatttctttcttcatagtgttgccaaatataaataatagtgtagggttggcctgccatgtgttggagtgggcaggatctttggtgtgacaaaggtagataatttgtctagccaagttttgagatatcacaaagctaccagtgccttagccaggcagaagttatattcagaatgattacaagttgctctatgatagaaggtgctcaaataaatgttagtataggccagcactgtattctatgctacagggattccagaaacgaaaattagtaaggtgtagactcctttctactgggtcataagctatttaggagtctgtttctgtctatggttcctttgtgtgctcttgttaactatactgcaaagtaaacatattgtattgttgcagagggggagagattgcatctggcctgggagatcaggaaagctgaagcaggaggtggcatttgaaatgaaatacttagaagctggtgattaaattctgttcatcttttataagaaatgacatttatggaacacttattgcatgctttgagctttgcaacaatctttcatttaatccttctaacaactcagtgggaaaggtacacttatttcacagaggaggaaccgaaggctcagttaacttattggagcaatgccattggtgccacacctggatggccttgctgggccagcttctcttggtgttggctgccaactagttcacaccagccttctcctgaggaatgctcttggctgatgagagcactcatacctggagaagtaatctggaagggaaagtcaaggaaaccttgctgactaagtagacagtatgaaaaacactggtgagagactttggacttcctggatctgtcttccatctaatagatattccagaaagagagactttaaggttttcttttttgttttaatggagaatagaaaataatccctttttttttttttttttttttttgagacgggatcttcccctgtctccgaggctggaatacggtggtgcgatcaaagctcactgcagccttgaactcctaggctcatcatgcagtcttccctcagcctcctgagtagctaggaccataggcacatgtcaccacatctggctaatttttcttactttttggagaaatgaagtcttgctattttacccaggctggtcttgaactcttgggctcaatgattctcctgtctcagcctcccaaaatgttgagattgcaggcatgagccactgcgcctggcctaatccatttgtttgtttttttgtttgtttgtttgttttttgagacggagtctcgatctgttgcccaggctggagtgcagtggagcaatcttgggtcactgcaacctctgcctcctgggttcaagcaattctcctgccttagcctcctgagtagctgcgactacaggtgcatgccaacacgcctggctaattttttgtatttttaatagagacagggtttcaccatgttagccacggtggtctcgatctcctgacctcgtgatccacctgcctcggcctcccaaagtgctgggattacaggcatgagccactgcgcccggccctaatccattttttttaaagtgaatttccttgtggccccaggtggtgagcaacaatagtgggagaaagttcacacacagatatcacctagtataatttcaacctcctaagaattccaaggatcgttcgctaaagctaaggtgaaaattctacgtattgccagaggagacatagaaagtttcaacagactggcactcaatggtttatcttccaaatgggaactatctccaaagtgctaaatttttatgaaggaagatgattttgaatttagaattctatattctgtttactatctttaagagtgagaacaaaataacagtgttcttgaacatgcaaacactcagacaacactgcatacataattttgggggcccaatgcataataaaagcgtggggctgcttgttgaaagatttaagagtttgggccgggtgcggtggctcacacctgtaatcccagcagtttgggaggccaaggcaggcggatcacctgaggtcgggagttcacaaccagcctgaccaacatggagaaaccccgtctctactaaaaatacaaaaattagccgggtgtggtggcgcatgcctgtaatcccaactactcaggaggctgaggcaggagaatcgcttgaacccgggagacgggaggttgtggtgagctgagatcgtgccattgcactccagtctgggtaagaagagtgaaactccgtctcaataaataaataaataaataaaaattaaaattaaaaattaagaatttcaggatggcaactgcagagcattaaaataagtgtgggacccctctgaatgcagcgccccatgcagttgcacagctcatgtgcccaggaagctgagaaaactcaccacccatgaagtcttctggaaaaaagaaagcatttaattcaaaaaagtggtgagtgcgagacaaaacaaaaaatgatcccagtaaaacataaaaaaaattattgtctttaatattctttatgaagcttaatgatttttagaataccattaagaatagaggggagggcttggcacggtggctcatgcttgtaattccagcactgtggaaggccgaggtgggtggataacttgagatcaagagttcaagaccagcctggccaacatgatgaaaccttgtctctactaaaaatacaaaaattagccggcagggtggcacgtgcctgtaattccagctacttgggaggctgaggcaggagactcgcttgaacctgggagttggaggttgcagtgaaacgagattgcaccactgcactccagcctgagtgaggaagcaaaatctgtgtctcaaaaacaaaacaaaacaaacagaatagaggggagatgtgtacttaaaaatcatacacattaaaatttgataatttcaacaacaggaaagagatggtcaagaagtaagagaaaagtaaaatgcaagcttaaagttttgttagacttgggcaggggatgtttaaatactgattaattagaactaattgtatttttaaaaattaattttaaatatgtaaaggtaagcacaatatttaaaggtaactgcaaaattagtgacttacccaacatacatttataatctcatggtttctgcggatgaagaattcagacatggctgagctaggtcctctgcttcaagatctttgcatggccgcagtcaagatggtagccagggctggggtctcaaggctggagtcaaggtgatggccagggctgggcttcctctttgagtgaggaaggacatgctttccaagctcatgtggttgttgggatttggttccctccagctgatggattgagggccttagttggtagctgtccatctgctgaaggccaccttcagtttgtttccacgtgaacctcctcaacatggccacttccttcatcaaagcatgtaaaccaagaaggcagtggagagtctaacaagacagcagttacaaccttgtgcagtgtaatcatggaagtgacatcccgcggtctttgctggattctgatggttagaaggaagtcacaggtttcatccacactcaggagcagaggaactctcaagggtgtgagcaccaggagactgggatccctgggggctgtcttagagcttactcactaccacactcattcataataaggcctgtcagacaagggagacttggtcatacacctgagttatataaatcctcatccagtctccctatggttgacaaggtgtcttgctcataagcgtcagtacctggtgtcaggtgctctcatataatcaatcactgtttgttgaatgaacatgaattgctacaaataaaagcagttttgaaaaaac

SEQ ID NO: 18881 - DNA, 4126 bp, Homo sapiens
  CDS (2900)..(3217)
cggtttgctataatttcttaaaattcaatcaatttcacatccattaaacttacaagtaccgtaatccagttttcctaggaaaactaagcccagccgaaccttgggaaaaatacctctgtgttaaacatatatacatgatcgattttaaatgttttcaccacaaaaaatggtaagtacgtgaggtgatggatttgttaactcagaagcaggcacaccaaatcacaatgggtctgattcgatcctccctgatggcaatggagacccatctaactaatcccacttctaattacctttctttttctccttacagacctaaaaaatctcaccatttctattagcctgaaaatccctctgttcttctcttcctccttcagcactgaatctcgcttacactaggttttacttaatgattctcctccttatactttctgtctcaccagtttcctctcacacttatttacctgctacacaaaattattcttattgggcttatgtgccctttcctccacttattcgacctctcacctggattgatgctcctgcggaaatctacattaacgatagtttgtggatgcctggagctacagatgaccgttgccctgctcaaccaggagaagaaggcactacatttaatgttatcatgggttataaataacaccctctgtgcctcagaaatgcacctggttatatccatctagaaactcaagtctgggctgcttatcttcccgagggatcagctacagaggaaccgggacatttggtctctggcctctccctttctcctttaaaacaaatgaaagggggagtaatgggacataccccatactttcaataagtagcctccaggcattcccttccaccagaggagcaattgttttttaaatagccctttggcgcccagtctattactaaaccatatgagtcattttttaatattactgcatgtgagttaacatagtcttcccaaattaaagttttagatgggccctcaaaatttttagggcatggttttcctgcaggtttatatggaaagtatggggtccctgacttctcgcaacagtggcctacactgcctttcagtttacctaggcctccaaagcactttagcctgtggggcttgccagaactcgggttccagctcctggaatggacagttcccctctggctagggttgatctaatgttccctctgggttactggctgagttctgccctgtgtggctttctgctgtgccagggctgcactgagttcaaatgcagagtctcacaatcattgtattcttcctcccccaggagcacccattctctctttacaccaattggccactgccaggggatgaagagggatgatgttgacaattcaagactatttcttaccctcttcagtgcctgtttccttaatatgataataaaccaggtactgcgatcactcacctgattattggttcttatgaaggtgcttttttaatgtagttgttcagtttgatatttctgtcggagggatgactgctggaggattctattaagccatcttgctctgccttcttgcaacacataaaattcaacagttttgtgcaactgtaagttcaagtgtttgtaattttatttatttcattttttttctttgagatgaagtctccctcttgttacccaggctggagtgcagtggcgcgatcttggctcactgcggcctctgcctcctgggttcaagcaatcctcctgccttatcctcccaagtagctgggattacagatgcctgccaccatgtcttgctaacttttgtacatttagtagacatgaggttttgccatgttgtccgggctggtcttgaactcctgacttcaggtggtgcacctgtcttagcctcccaaagtactgggattacaggtgagagtcactgctccctgctgcaaatttcttattaaatctgtttgacagattttagaatttctataagtaatgtttaaaattacaaccatttgggctgggtgtggtggctcatgcctgtaatcccagcacttattttatttcttatcaggagaacgagaatcatcatactactttgcatcggaggttaagctcattcttttccttaaaatgggaagataaaggcattaccccctctccgaggcctcatatgatactccccattctgacccagaacacccagaactttggaaattggctattgccatgtctggactgcaagtatgggaagcagaaactattctgtctgttgtccccactaccatctccctctctcagtatcaacgtagatccagacattctgctttacctacctccaacctgtttccatacagagttctgttaagcctccttgcatgctgttagtgagatatatcaaaatttggatgaacaatcaaactgtccaatgcattaattgtcatttatacacttgtattaactcccattttgattccaggaaaagtgtaatgttggttcgagctcaagaaggaatctggattccggtaactttgcccagaccttgggaatcctccccttcaatacatttaattaatgaagtgttacagtgaattctaaaaagatctaagagatttattttcactttaattgctgttatcatgggcctaattacagtcactgcagtggccaccactgccggaatggcattacaccagtccattcaagcggctcattttgttaatggttggcaagccaattccatccaaatgtggaattctcaacaaggcatcgatcgaaaattggcaaatcaaattagtgatttaagacagtctgttatttggcttggagatcaggtagtgagtctcgagcatcacatgcaaatgcagtacgattggaacacttgagatttctgcatcaccccgtattcctataacgagactgatcattcatgggaaatggtcaaaagacatcttctgggtagggaagataatttatcactggacataactaaattaaagagacaaatttttgaagcctctcaagctcacttatccattgtgcctggagctgaggcgttagatcaggtggcagaaaatctttctggattaaaccccaggacttggattaagtctattgggggctccactgtagtaaattttggaattatgtttctctgtttaatcggcttgtttttagtttgccagactagtcaaagaatcctgcgtcaaaatcaagagaacgaacaagccttcattgccatggcacatttattataaaaagaaagggagagatgttgcgggaagtcagggaccccggagggaccagctgaagccatggcagaagaacataaattgtgaagatttcatggacatttattagttccccaatcaatacccttgtgatttcctatgcctgtctttactttaatctcttaatcccgtcatcttcgtaaactgaggaggatgtatgtcgcctcaggaccctgtgatgattgtgttaactgcacaaattgtagagcatttgtgtttgaacaatatgaaatctgggcaccttgaaaaaagaacaggataacagtgatgttcacggaacaagagaaataaccttaaactctgactgccggtgagctggacggaacagagccatatttctcttctttcaaaagcaaatgggagaaatatcactgaattctttttctcagcaaggaacatccctgagaaagagaatgcatccctgagggtaggcctctgaaatggctgcttcagggcagctgtcttttatggtcgcagctgtggggatgaaataagccccagtttctcagagtgctcccaggcttattaggacgaggaaattcctgcctaataaattttggtcagaccagttgtctgctctcaaaccctgtctcctgataagatgttatcaatgacaatgcatgcccgaaacttcattagcaattttaatttcaccccagtcctgtggtcctgtgatctcgccctgcctccatttaccttgtgatatcttattaccttgtgaagcatgggatctctgtgacccataccctatttgtacactccctccccttttgaaaatcactaataaaaaatttgctggttttatggctcagggggcatcacagaacctgccaacatgtgatgtctgccctggacacccagctttaaaatttc

SEQ ID NO: 18882 - protein, 106 aa, Homo sapiens [sequence omitted]

SEQ ID NO: 18883 - DNA, 3666 bp, Homo sapiens
  CDS (2378)..(2857)
tttatgtatttatttatttgagacggagtttcgctcttgttgcccaggctggaatgtaatggtgcgatctcggctcaccgcagcctctgcctccggggttcaagcgattatcctgcctcagcctccagagtagctgggattacaggcatgcgctgccacgcccggctgattttgtatttttagtagaggcggggtttcaccatgttggccaggctggtctccaactcccgacctcaggtgatccgcctgcttcggcctcccaaaatgctgggattacaggcgtgagccactgcgcccggcctgagaaggggggttttattgggcagaggagatcagcagtggattcaaaggaggcttggaaggaggcaagggtgtcacagagtgggatccttcagggcctgggtatgatgcctgcactaacctcactggacagtagcgtaggctagacaagattttagagatgtgttgtgaccagctgcactccaggaaaactgtttacattatatcttacctcattcatccagcctttgcatttttgtttgcttgtttttgagacagagtctttttctgtcgcccaggctggagtgcagtggcacaatcttggctcactgcaatctccgcctcctgggttcaagcaattctcctgcctcagcctcctgagtagctgggataacaggcacccgccaccatgccctgcccattttttaaattatttttagtggagatggggtttcaccatgttggcctggctggtctcaaactcctgacctcagatgatctacccaccttggccccttggcctcccaaagtgctggaattacaggcgtgagccaccacgcctggcccagcctatgcattttttttttttttttttttttttttgagatggagtcttgcaccgtagcctaagctggagtgcagtggtgcgatctcggctcaccgcaacctccgcctcccgggtcctggttcaagcaattttcttgcctcagcctcctgagtagctgggattacaggaacgtgccaccatgcccagctaatttttgtatttttagtagagacggggtttcaccatgttggccaggctggtcttgaactcgtgacctcatgatccgctcacctcggcctcccaaagtgctgggattacaggcatgagccactgacgcctggccagcctatgcatttttaagaaattattctgtattaggtgctgtgctaaacattgggcactacagtgaccaaaacagactgaattccccaagagccaaagaccagtgagggagaccaacaagaaacaggaaatgcaaaagagaccattattactcactatgactaagggccacaaatggggtacgttgatggagagtgatttgttaagagactacagagggaggacagactaccaagaggggggccaggaaagctcctctgacgaggtggtatttcagcccaaactggaagaatgagaaagagctagccagccatcagaatagtccagaagagatggggagcactacactcactacactttggcctgagaaaatagcatgggattggaggaggctgggggaacaccacttctgccgacctgggcaggaggcattgagggcttgagaaagggcaatggcagtagcagtagaaaggacagggtaggagcagggactttgcaggtggaatcattaggtcttatcaacagatatgggcaagcaaagccaggggagaattgatggtaatgctgaggtttggagccaggctagatgggacagtggtgggtgatgcaaaggaaagaggtcaggaagcagggccagacgtggggagaaggtgtgggggtttggtttccatcttgccgagtctgccggaatgtggatgggaagaccaagaggaggagcaaggggcagaggggaagggaatcttaaagaagtcctggatgccacactcttcttccttcctcctcttccctctcctcagaggtctcactcgtggttcttcatttcctgccctgcctccatctcctctgggtgctgggaaagtggaggattagctgaagttttgcttctcggggcctgtctgaatctccattgctttctgggaggacataattcacctgtcctagcttcttatcatcttacatttccctgtagccactgggacatgtgtggtgttccttcctagctcctgtctcctcctcatgcctttgctgggtatgggcatgttagggggaaggtcattgctgtcagaggggcactgacttcctaatggtgttacccaaggtgaatgttggagacacagtcgcgatgctgcccaagtcccggcgagccctaactatccaggagatcgctgcgctggccaggtcctccctgcatggtatgcagcccctcccatgtttctggccactttgtcctttctcctcccgtttgcacatccctttggaactgtttcctgtgagtacatgctggggtctcccctttcttcccttgctcaggtgaatctcagccccttctcccacccaaaggttcacatggatcctaactactgccacccttccacctccctgcacctgtgctccctggcctggtcctttaccaggcttctccaccctcccctatctccaagtatttcccaggtggtgaaggaccacgtgaccaagcctaccgccatggcccagggccgagtggctcacctcattgagtggaagggctggagcaagccgagtgactcacctgctgccctggaatcagccttttcctcctattcagacctcagcgagggcgaacaagaggctcgctttgcagcaggtggatggcagaaaggggataagctacactcttggcacagggctgctttctttctttattttatttaatttttttttgagacggagtctcactctgtcgcccaggctggagtgcagtgatgcaatctcagctcactgcaacctctgccaccccagttcaagcgattctcctgcctcagcctcccaagtagctgggattacagttgcctgccaccgtgcctggctaatttttgtagttttagtagagatggggtttcaccgtctaggccaggctggtcttgaactcctgacctagtgatccacctgcctcggcctcccaaagtgctgggactacaggcataagccaccacacccggccagggctgctttcttatctcctcgggtctgacatgggggttggagtcttcccataccctgtttctcctctctcctgtcttcaagctgagccctagacttaactcaccttctctgcttatgcattctgtccctgcgacaggagtggctgagcagtttgccatcgcggaagccaagctccgagcatggtcttcggtggatggcgaggactccactgatgactcctatgatgaggactttgctgggggaatggacacaggtgagggacatcctgggctagggctgtggtggacccacctgatagaccttggcattctttcagagccacatccagaacactctcagcctttgcaaggggagggagagggacagactcagtccaggcaggcctggacactccagggacaggaaggctgtccacactcatgggtgggaaatgagcagacagaaatggattcgttcctttcccacaggtgctgaggcttctctgcctgtctgcacagttgtgccttgcagtcctc

SEQ ID NO: 18884 - protein, 160 aa, Homo sapiens
MFLATLSFLLPFAHPFGTVSCEYMLGSPLSSLAQVNLSPFSHPKVHMDPNYCHPSTSLHLCSLAWSFTRLLHPPLSPSISQVVKDHVTKPTAMAQGRVAHLIEWKGWSKPSDSPAALESAFSSYSDLSEGEQEARFAAGGWQKGDKLHSWHRAAFFLYFI

SEQ ID NO: 18885 - DNA, 3699 bp, Homo sapiens
gaaatcaaaactaaaaatccttgatgatgtgttatgggtgtggtttgtacaagagagctaatacagaattccattcagtgaatcctctgtttaaagagaaagccttggcctttgtcagaagatgggaaaacaaatgtacatttataaactttcagttaaaataaaatgtttaaattatatatctgtgtatcttttttttttaaacgattccttctaacctttttttttaaacgattccttctaacccatttttttttttgttaaacccaaccagccaactcttggtcctgattgtattggaaactagggcttctattaaagatagttaacatctatttagttcatatacaatatcagcattattcgaagagtttcacttgaattatctcagttaagcttcgtaacaaccctatgtcttctctttatagttaagaaaactgaaccttagagaggtgaagaattcgtccagggtcataaaactagcaagtggcaaaattgagatttaaacactgctaggtgttaccttaggatctaaacttttaaccattactccaaagtacaggctgggtgcggtggctcacgcctgtaatcgcagcactttgggaggccaagacgggtggatcacttgagcccaggagttcaagaccagactaggcaacatgacaaaaccccgtatatactaaaaacaaaaattagccgggcatggtagcacacacctgcaatcccagctccttgggaggctgaggcatgagaattgcttgaacctgggaggcagaggttgcagtcagccaagatcgcaccactccactacagcgtgggtgacagagtgagaattggtctcaaaaaataaataaataaactacataggaaataaaactacctggaatcttttcttttacaaaatcaatatgacacacatatcggtacttgacaaagacaacatgaaaaattttataagatattaggccgggaacggtggctcatgcctgtaatcccagcactttgggaggccgaggtgggagggtcacttgaggccaggagtctgaaaccatgcctggccaacatggtgaacgcccccatcccccatatctactaaaaatataaaaattaggctgggcatggtggctcatgcctgtaatcccagcactttgggaggctgaggcgggtggatcacttgaggtcaggagtttgagaccagcccggccagcatggcgaaaccctatctctactaaaaatacaaaaactaaccgggcgtggtggtaggcgcctgtagtcccagctcctcaggaggctgaaacacaataattgcttgaacccagaaggcggaggttgcagtgagccgagattgctctgccgcgctccagcctgggcgattgagactgtctcaaaaaaaaaaaaaaagaaaaattgtataagatattaatccaagaattctaagggaggtactagcaaatagtatccagctttttatcacaaagttaacctgcagaaaaatgatgggagctaagatgatacagagggtcaagaaaggtatctccctttaagtgacatttgagcagagatctgaatgaagaaatggcaaagtaataaagactctgaggcatatttggttttttttttttaggaatatgttctcagtgaaccatatggggggaaagcttggtttatccattttatagcatgctgtactgttactaagaaggaaatagttggtcaggcacaatggctcacgcctctagtcccaacactttgggaggccaaggcgggcggatcacttgaggtcgagttcaggaccagccttgccaacatggtgaatccctgtctctactaaaaatacaaaaattacctgggcgcagtggtgtgtgcctgtaatcccagctacttggaaggctgaggcaggaacatcctgcctcaggtagcttgaacctgggaggcagaggttgcagtgagtcgagattgtgccactgcactccagcctgggtgacagagtgagactatgtctcagaaaaaaaaaaaaaaaaaaggaaacagttgatttggagataaagaaatggaaaagcagcatgaatagttacagaaggctatattgagattgatctcatttaggtaaaacaaaagactcaaattgttaatctgaacatggactttcaagaagactagggaggagaaattttcattttctagtttatatatttcagcatgtttttattttgtcaagatacttataattttataaagagattgaccgggcacagtggctcacacctgtaatctcagcactttggaaggccaaggcaggtggatcactagagcccaggagtttgagaccagcctgggcaacgtggccaaaccccgtctctacaaaaaatacaaaaattaggtgggtgtggtagcacacacctatagcctgagctattgggaggctgcggtacaaggatcacccgaacccaagggaggtcgaggctacagtgaactgtgattgcaccactgccctttagtctgggcagcagagcgagaccttgtctcaaaaaaacagaaataaaacaacaaaacataaaaagatgcttcaattttgatttcatagcattaatttcttttcagacatgaagaaaatgaagtttctgataaacaaatctgactataatgaggcaacggagtataccgaaaagtgtgtggcctttagaatcttacagggttgggttctaatgccagctcagctacttcctgcgcttatggtttagggtcccatatgctcttaagtttttttcttcaaaagtaaaagaggactgataacatgcttagggttgtgagaattaaatgtaaataagttttcagtacatatttcttccctcaccttatttacagtaatgctaggttgtttataggctcaggaatgatgagacctagtgtcagtatagtacagatacatgtaaaactgatcaagagtgataacactaatttgctttaaatggctttacaccatagtgaatgagttattttatttataatttgctttgttccagaaagtattttaggcagattacaaatattttataatagaagtagcatagattaaaaagtgatggagggaggccgggcacggtggctcatacctataatcccagcacttcgggaggccgaggcaggtagatcatctgaggtcagcagtttgagaccagcctggccaacatagtgaaaccccgtctctgctaaaatacaatacaagccgggcacagtggctcatgcctgtaatcctagcactttgggaggccgaggcggacaggtcatgaggtcatgaggtcaggagatcaagaccatccgggctaacacggtgaaaccccgtctctaccaaaactacaaaaaaaaaaaaaaaaaaaataaaaaaagccgggcatggcggcgggcacctgtagtcccagctactcaggaggctgaggcaggagaatggcatgaacccaggaggcagagcttgcagtcagccgagatggcgccactgcactccagcctgggcaagagagcgacactccatctcaaaaataaataaaaaaacaattagctgagtgtggtggcacacacctgtaatcccaggtacttgggagtctgaggcaggagaactgcttgaacctgggaggtggaggttgcagtaagcggagattgtgccactgcactccagcctgggcaacagcaagactccatccc

SEQ ID NO: 18886 - DNA, 3987 bp, Homo sapiens
tttaaatctaagggatattttcccttcctatagaaaaagatgcttttgcttggcctaatgaccatactgggcagagatcagggtgaaatccagagacttcagcccatgttactagtttcagctacaggtgagaagtagcactgcaaagaaaagctaaactggtaaccttgctgtgtagcagagatctttggtcataggagtattcctgcatgggccataaggttgtggtttgaggtggaaactccctgaaacatcagctggaaagtcgcctttagaataaagacaaagaaccttctgcaagccagccaaggcaataccaggacttggaggtggcaagtttgataaactaatctgtaggaaaaagttcctatcttagtgcttacacagttcttttttctttttttggtatagacggggtcttgctacattaattctttgactggggctgggtcttcttttgcacagggcagcttgagactacaatcaccatggcttcctctcaataccaagtcagggattaggctgtaagaataacaatacaagtactaaagactgaaattttattaaagccaaagattgagaactggtttccggacagcttctagccatgcattcataggctgtgagcaggagtcctgtagaataacaggagacctctggggtccaagctctgagcttctgggcacattttaaatgggtctcactttattgcccagtctggaatgcagtcacatgatcacagctcactacagcctggaacccttggactcaagcagttccaacctcagcctcctgagtagttgggactacaggcacgtgccacctcagctaattttatttatttatcttttagagacagggtctcgtatgttgaccaggctagactcaaattgctgggctcaagcaatcctcgtgcctcagcctcctgagtagctaggattacaggcatgggccaccactcccagcttaaatagcagttctgttttttgttgaaaaagtagaaaatcatcataaaacataatttggtgaatacaaaaagaaggaatctgagtcacagtcttaccacctgagatgttgaaaacagctggtttaaggggaattgggttctgtagtgagctggggcccaaaattcacagccagagtgataaggaatgtagccactttgtaggacaaaactccaggacagggcgtggtggctcacgcctataatccctgcactttgggaggatgaggctggtggattacctgaggtcaggagtttgagaccagcctggccaacacgatgaaaccccatctctactaaaaaaaacaaaaaattagctgggcgtggtggcacctgcctgtaattccagctactcaggaggctgaggcaggagaatcgcttgaaaccaggaggcagaggttgcagtgagccaagatcgcaccactgaactccagcctgggcaccaagagcaaaactcccatctcaaaaaaacaaaaacaaactccaggataagcctcctgccacatagcaagtgctggagcaaaggccatgcccacaatgaaaggcacatacccacaggctgcacaagctccagacctcctagatccagtgatacaggggtgacaaggcacctagtattgaggtgcggttgcatgggggcagggtgcagtggtgacatgagctctggccaaggtttgccacctggtaaccctttcccctggaggttttgctacttccccctacagaacaacctgacattttggttggtgctgcattgttcagtgcctgccaccactcatcagtcaacgacatttacctagtatctaatgggtgccagattgcatgttgggctgggcaccacaaactgaaaaggtccacttctgcagcacttttgcagggatggagcctggttgcgtggaatgattgtgggcacctgttttgtgtaaatcttagttgaaaagctttcctatcttccgtccttgggcttagagggaaactagggcaggaatgaagcagagagagcctactaagtgccaggtactcatagacattcatttttccactgaatcctccaataaagtttgaagtaagaatcatccccactttgcaaatgcctacactgaggtaaagtaacactcaatttgaaggaatatctaccagctcacacctactagggacaattcaacattcttactatgagagtgtcagagggaatggaaaatgcagccctagaaggatgagattttggtgccaactttcatagcaaaacaagaactttagtcactaggcccccacagctcaaggttgacctctttactgttcattgcctctctgtcatattaggtgaggaccaagacctgtctcagacccctaacagcaacattctccaaggcaaatgaggctgaagggggccacattcaaggatactttgggttcattggttcattagtctatgaggctgggaaagaaaggacttcggttaggaccactggtttatattctaaagaggcatccctgtttgacacaacatcaaggaaaaaagctctcactctagtgtaggtaagaataggggctaaatagtgtcaatgtcactcaattttttttcctctccccatccttctttttggagacaaggtctcactcagttgtcaggctggaagtacagcggctcggtcatggctcactgcaacctcaacctcctgtcctcaagcaatcctcccacctcagcctcccaagtagctggaactacatacaggtgtgcaccaccatgcctatttttttttaattgttttgtagagatggggtcttactatgttacctaggctggtcttgaactcctagcaagtgatcttcctacctcccaaagtgctgggattacaggcatggagcccctgcacccagcctcaatttttattttctgttctttgatttccaagaaatctgttcagatgatagtctttttaccccacctcctcatttggttcagtgtgtgttgatgagcagggcttcagacccacatccatcactgataggaccacatgcagaggactctgaccctactgcagtcattatgaaaaccttccaaaccaaaataagaagggtagccaacaccaccaccacctagccccaggagtcctaactttagaaaaggcagagtgagctgtgcgcagcatgcatctgtaatcccagccactccggaggctgagatgggaagatggcttggggccagaaggtcaaggctgtagtgtactgtgactgtacctgtgaacagccactgtactctagcctgggcaacataccaagatcttgtctctaaatttaaaagaaagggaaaaaaaaaaaagaataggcagagtgaactttggggaagaaacaatcttgcctggcttgcttttcattacatatgtatatatatgtatgtatatacatacacatacacacacacacgcagatacacatacccaatgacagtagagattttttttaagggtgcactctttgttgaatgaagtttccatatgaccaaaagtcttcaataagttctaaaactcttgcctctgaagatctgtgtttactcttaattcctacagaaaggtatccctaaactagttaagaacgatagccataactagatgttatagggcacacaggtctcagataccagaagctgacagtctccttccagacataaagggatacccagcagagattctttagagctggagagctgggaaacaccaaattatctgacatttagggtaacacaattctcattttttatatgggacagtatgtattttactacaaactacaaagactcagaggatggacagtgacagttaatatgattcctctcattgcccataggtaggccaccgatccaaatggatcctgagttcagacagaatccttacctcctgataaggttgagtgaggattattaggtgagccacagactaaggaatgtttcagaaagcagttttctaggtgtagtttggatttac

SEQ ID NO: 18887 - DNA, 6020 bp, Homo sapiens
  CDS (1036)..(1425)
tttaatgggaaactccccccgcacacacacacactttttttttgaggcacagtctcactatgttgtccagactggttttgaactcctgggctcaagagatcctcccacaccagcctccccagtagctgggactacaggcatgacccactgcacccagctaaatttttcaattttaaaatgttggcaactcacttaaatgtaagacaaataaacacatctgtaggctggcagtgctgcccacactgcccagactaggggttagggggtctgtatgggccatcaccaggctgctaaccacagcaaccaatatgtgccaagcctgactacacgtaccttctcattccaccctcctggcagcctcacatctgctttacaggtggggaactgaggctctaagagactaagaaaattacccaaggccactgcagctagccaggggcaggtatgggagtcagagctgggtgcagctgactacaaaccctgtgctcaggatgacaccctctaggagcctcgacctctctcccagttctcttctccctccactcaggcaaatgagctctgccttcacagggcaccaggctggaacatatgtctggaggccaggggcggtggctcacgcctgtaatcctagcactttgggaggccaagatgggaggatcattgaggtcaggagttcaagaccatcctggccaacatgatgaaaccccgtctctactgaaaatacaaaaactggctgggcatggtggctcatgcctgtaatcccagctacttgggaggctgaggcaggagaatcacttgaacccaggaggcagaggttgcagtgagctgaggtcgcgccattgcattcaagcctgggtgacacagtgaggctctgtctcaaaaaaaaaaaaaaaaaagaaggaacttctgtctggggtgtgcctagcagtcattcacaccctcactgaaatctcagctccctgggaaaggatgtcgtgttaaagggagaggaaagaacagacagcgtgggagtctggggtctgagctgggccagccatggaggtgatggggcccccgacagccagaggccagatgcagcttgaggctttgtcccgtaccacgcctgttgtactgtggggtgtactttgccatgcataccttgctcgcgtgctgcgggcattggctgtcccagcttggccccactcttgcaaagtcagcttgtgccaggtaagcaggaaaaagccgatggcttatctgattcccggcaaggcagaagcaggctgggaggtgcgtgtgtgtacattagcatgtgtttcagcgtatccagaccagcttccgccaggagctaggaccaccttgggcaggtacatggtgacccatttgacctgcagattcttaggaaactttttggaaaccatatgcccacttgcagtgagacacagtggttaggagcatggagccagttggcctgggttgaacagtttattagctgtgtggcctggggcaaattacgccctgggactctcacccgcaaaccagagataataatagtacctacctcatggggctgttaggcaaattaaatgaggtcagataaatgcaaagtgcttagaatggcgcttgatgtgtaagaagggctcgacaaggttctctattactatcattatctccagcccaggcccaggaatgagcttccactctagtcaggaggggtgaagcccttcctggcttagcaccacccttccatcaccatgacaacgcacatctccttgtgggagtgggggcagcatcaggagaactggaagccaggagctggctgtgcaccttatctgacctgcttctagaggctcctgggcacctccaggacttaagggggtagactaggacttatggcaccccaaatgtgctggataaccctgactggagcatggcaccgaagcttcttgactccaaagccacagactggggagaaccccggaattcctgaaaatgtggagggccttagctttaccctctgattcgaccccagtcccaaagggaacctacaggatgctccgaggggttgggaattggtgggtcacactccccaaggactttttatactgcgtctgaatggtgtttgcatttttttgcaaattggttgctacctttaaaactcaggaaatggcacataaaaaattcaggtatctggcttttctttaaagtgccagaagatcaagccacggtggttggcattcctgctggggcaaaaatgcagctgcccttgggccaggccatcactctgcagttcttacctccccttccccttgccctaccaccctgcaccaggcctgcaggcttaccatgtgtaaccacctctctgaactacaagggaatccagaaattggggtgggcattatcctggccctcggtgcccttgacctgagatcagtgcagcccatcccaaattcctttttccaggactcccacatacacccacttagaacacatctgtgagccagatttacttcttagcacactaataaaacaatgagcagtcacctaggttcaggtaatgggttgtacgagctcccagacctttctagaacaacttaagcctcagtcattcctaaaagctgggggtggaggatggggtggggaagaaaccatgccaagcagtgaaaggactgataatagaatattgcagacacgcagcctttccttcccattcaaaatggaagcatttgaaggaaggctctggctcaagccaggggggccttgctctaatgagtcacctactgcgtcgccgctggtcagcctgatgttgttaggatggaaatgagctggggttgccagatttggcaaatacaaaaacaggacacccaggagcattgatgttttggatgaacaatggaaaagattttggcgtaaatatgtcctgtggaatatttgggacacacatattaaaaacgtatttgaaatttggccaggcgctgtggctcacacctgtaatctcagcactttgggagaccaaggctggtggatcacctgaggccaggagttcgatatcagcctggccaacatggtgaaaccgcatctctacaaaaaatacaaaaattagccgggtggggtggcacatgcctgtcatcccagctacttgggaggctgaggcaggagatcacttgaacccaggggcagaggctgcagtgagccgagatcgcgccactgcactctagcctgggcaacaaagagagactccatctgaaaaaacaaaacaaaacaaaacaaaatctgaaattcacatgccactgggcatcctgtgttttatctggcaatcctgagaagagtcttagaatgcttgaaaagagctttaaacatcatttcttaaaatgccaagcctccctttggtggcactccccttatagctgagtgtaagctctggatgacaggcacgtgggtgccaggaggccaggacctaggagcgggacgctgactctctgcagccctctcctctcactctcttttcccttccagtcacagtcactgcagcagacatcatggctgtggatgtggcagaataccatctgagcgggtccccggggagaccctcatcctgctgcaccctggggatgagcctgtgactcggaatccactcaccgaggccttctgtggagactgtcaagtagccaagggaaaataagcccaggaaggtcaaggttagattcatggggcgttaaactcagagaccacccagtccagaggcagaggttatagtgagctgagatcacaccactgcactccagctttccagcctgggcaacagagtgagactccgtctcatcagaaaaaaaaagaggccacccagtccagggccatggctcccaccttgttaccctttgcctcagcagggagatgggagctggctgggagatgcctcgagactccagacatactcctgcagccctccccatggacagcggatggggtcagagaagaaacataccagccgtcttttctccctttgttcctctcctcattcacagatgggagaagtgaggcttagagagtaacggggtcaggatgtgcactcaggtctcctgactcccagccccgtgctccccatcactctagcccctaccctaacgcagcccctggggagcccagggctgatctgaagggtgtgcccgggaatcacctttcccatcactttttcccaaaagtgagccagggagccgcacttttcaccctcaggctcacaggtcttgcccccctgcccccaccctgccccctacccgtatggccttgggcaagtggtgaaaccggaacttctacttacttatctgtaaaatgcaaaagatgaggcttgcctcagggctgttgggaagatttagagagctgatggttgtgcagcgcccagcatggtgcaaacgccactcttccagtggcagcgctttgcacacgctgttcccctgtcctggagtccttccctgcctctgccactgcctgcctgagtcctggcacctggtggtggggttataggtgcagatctggacccagtctgtctggaggcagatctctcctccgtccctcagcttcctcatctgtaaaatggggaaaacaatagaaccaacctcacaggattgccttgactccatgggttaatatacgtgacgtgcttagaacagggcctggcaaatcataaatagtaagtgcttcataaggggagctattcctcctcctcctcatcccactcgtttctggtcttcgcctagaccccacttccaatatcaccccaagactggtattccataaaatcaataaatgaatgcgaattgtcatttcatgtcaccttcctggggcttttccttctgtgcccccagccctgcccccttttctgccaccccgggcatgggctccacccttcagctcccaaagagcctcaggcacaggggagcctgaacctgctttgccacctggctgtgcccacagcctgcttagagaccttgggcctctggtcctgccctctagccaacccccggctactacccagccctgctgtgaccctgttcccaggactcccagaatacaccaagccttagcagggcggggcccgggagcctccatggatctctttgtcatgggcatacgtagcccacaggtgacattctgtcaacagcggcaggaggaaggagggtttcttcacagcccttccaccgtcgttacccattccttctgtttttccctggtctgcccagcccgtgactatgtgctgcgtgacttttgcgcacgtcacacgattgcgtgattagaccatgttggggattcatttttttcctctcttaacaatgccagaaatgtgtctctgcattgccacagtgccatcctaatgacctcaattgtcattctcgaaggccagtgacgtttcctcccaagacagagccaccagccctcactggccccctcggtgggaccttcaggctgtctccagatttctgctgttataaatacagcctcgatgactcatcccagacacaaaacctgttgggattttccctttagaataaattcaccagagtgggaccgctggatgggggatgttcttgtcatccgcattttccaaacggagtatgaagcccagaggtgctgggtgacttgcctggaagccaaggtaccggtgcccggctctgccgtttctcaccgctggccttgagtggagaaacagatgtgctcattacccttccttggtctcagttttcctcttttagaaagtagggccttggccaggggcggtggctcacgcctgtaatcccagcactttgggaggccaaggcgagtggatcacctgaggtcaggagtttgagaccagcctggccaatatggtggaaccccatctctactagaaatacaaaaaattagctgggcatggtggtggacgcctgtaattccagctactcgggaggctgaggcaggagaatcgcttgaaccggggaggcagaggttgcagtgagccgaaatcgtgccattgcactccagcctgggcaacaagagtgaaactccatctc

SEQ ID NO: 18888 - protein, 130 aa, Homo sapiens [sequence omitted]

SEQ ID NO: 18889 - DNA, 4047 bp, Homo sapiens
taggggcaagattagaagctgggagaccatggatattaggcaagaaattatgagtatttgttggcaagatacagtgctattaattggaaagagttatttaggagattagcaaataattacatattgggtgacatggttgggagacagctcagtgcagagataagagaaagaagttttggtgaattgcatggttttgccccaggcaactgggtggacggtggaactgtaaattgagaatgattacaataatgctaacatttaaggggtatttagtatgttccaagcactgtgctgtatgctttacacaaagtaacttattcctcataataacctgtgaagtcggtaaactattacccccattttatagatggggaagctgagacctggagacaaaacggaagtcccacttagctaagattctaaaccagacattctgactccagaacccagcgcatagactctatattacggcaatattatagcccataccattgtcaataatagtatgaaatttgacatctcctaatcaactttatatctcacacatatggagtgatgacaaataatgccttaggtcaccacattagttggagaaatgtagcattaaattaccgtctcttatagtaaattaccatcaaataatgaatttgtgccaagtacaagagcactgaatttcccaacaatagatttataaataacaattggaggaaagtttagaagtaggcagtattttgaaaatttggcagttgctttttatattgcttgttttacatttttaatacaaatgtagggggaattctcagcatattagtacttctcttcacatagctaacctagtgtcttacagtggaaacgcatgtattccgttggaaacaggaagacaggaagtagaggcagtggataaagacaaccctttgaagaatttttttctttctttttttaatgggagcagtgcacaagtgcagggacttgagacgggagtactggcagcggagcggtgggagcggtagggaagctcagtacgtgaggggtgcagctgcagagagttgatcagtgtggtgttggagcgtgtgcttccgtattttcaaggaaataaaagaaatgaggttatgaggccttcccttccactagtcctttgggaccgttcttgtcaagaaccctggtgatgcccatactgctagactcccggtcagttcaccattctcctcctcctccatttgacagttcgtgattccctcctcttttctgaaatgctttcttcacttgctggtgaccattctcttttcccttctgcctcaccgccacttcttctcagcctcatttgcctcttgcctctttatcttctggacttcaaggtccagtgcacagtagatggactgcctttttctctgtttgcagccgctccccaggggacctcatgaagcccggtgattctgaatgccgtggatctgccgaggattcccagatgcgtatttctcctccgtacttccccacaggacagcaggcttgaatagctgattgcctatgcaggacaacaggcttgaatagctgactgcctatgcattctctttgcttgccagttttttggacatcaaacttgacagatccaagattattactttgatcttccccacacccctcccacccccgagtctactatggtcccatcatagtattctgaaaatcagtgaatggccactctaccagttatttctaccagtttttaggttctaaacctcaggcattctggactcttctgttcattatcatattttgaaggcattatcttcaaaatctatctagactctgaccctttctcccatctccaccattactgccgtggctcttctgctggtcggctctctcctggtggatcgtaataacctgcagtcagctatcctggtccagagggagcccgttaaaccctgtggaatcttatcacgcttctgctcagaacgagccagtgtctttctgtctcactcagagtgtaagctacagtccttattgtggccatcaggtgctgtgtgttctccagccccctccccatcaccgcagtcctgccggtgatcttagctgctctcccctcggcaccccctgcggccccctctgccgcagcactcgtggcctgctgttccttgaacatgcttggtgttttctctcctcaaaggcttctttctgtttacctgaaatgtactttcctagggaatctatctggctcactcgcttactttttccacatctttgcttaagtattgccttattggagaggcaccctaccataaactagaatcccttgccccagctgctctttgtcctccgtattgggctttgtttttgttcttaccagttagaaccacttgacacacgatacatgtgtttgttacccttttctaccactagaacagacgctccatggtggtatagacttatttccgcaaaccaccccccccaactttttttacacaatggttaaataacacacatatttttaatgcaatgcctgatatcacaaagcctaaaataacaatgtttggcacattatagctgtttagtaaaaggttattaaacgaattgactatatgaatgaatgcttagtaaatagcttttccatttatctgtagttgctctataaatcagtattgatgtaattgagtgtttttcttcctccacagtacaatggtcagttccgttcaaggaaacacatatcccagccaggcgccagtatatagtcatcctcctgccgctactgctgctgctgcaactgccgatgtcactctgtaccagaatgcaggacctaatatgccccaggtgccaaactataacttaacatcatcaactctgcttcagcccggaggcagccaacagccacctcagccacagcaaccatattctcagaaggctctgctataggacccggtgttcctcttggtggcagatacctgctaaatgccactgacaatgttatgagattcattactatcttaagatgtgtttatcctcagcttataggaatctctccaggtcaacaggttcaaatattcaagaaggtagaactctcctcaatttacactgactttttagaggttcttccccccccgcccctgcagaggaatgaaactacttacaacatttaattcctttcataatatgaaagaattgatacaaggctatttgtctcgtaaacctggtctgcagaaagtcaaacttacagaaactgttgtgacaaatgttatgtacatatattgatatgtaactgcattagtggccattttgaatcacagtggtgatcgtgtgaatatatttaacactgtgttaaattaatttacgttgctattttattttaatcataaacaactaccatgtttcttaatgttttgtgtaaatttaatgtaattatactatccttttaaacttcaagaaaacaaagttgttagcgtatttacatgaaggcgcattatgttgtcgtgtgtttcagtttcacattaaactgaaccttttactaattgtgagctaaagagatatatatatatatgtgtgtgtatatatatatatctacatgtctttctgtagcctctgcatactactggctgtcatcacaccagcgtacagtagctaaatttttggtgcaattatagcaaatgataatgttcccttttgaacttttacattttggcatgacatttcagagtattgtgggaccatgagacaaaattaagtacgatcacattctttatttctcattttaaagaaatgatgttggtttaccttttcctagttgaagatagtaattaggtttctaagctgtatactgtgtttattggtggcagtgacaccaaagatagaggcaatggatagaaatttttaaactggaaagaaaacctgaattacactacattttcgaagtctcttgtaattatttgggatatcaacaaaatttgattcgtctgtctaatcccttgctagtattttaaatgtgtctttaacacattgtatcctttaattcttcattaaaatggaaataagtagatgtttaaaaaaaaaaaaaac

SEQ ID NO: 18890 - DNA, 4924 bp, Homo sapiens
  CDS (103)..(2874)
ccagaagaaaaaccagaagaagagaaagaagaggttatagatgaccaggagaacctggctcatagcaggaggaccagggaagatagaaaggtagaagccatcatgcatgcttttgaaaacttagagaaaagaaagaagcggcgggatcagcccttggaacagagcaactctgatgtagagattactacaaccacctcagagactcctgttggtgaagagacaaaaactgaagcccctgaatctgaagttagcaactctgtttcaaatgttaccatcccaagcaccccacagagtgttggtgtgaatacccggaggtcttcccaagcaggggatattgctgcagaaaaactagtccccaagccacctccagcaaagccttctaggccccggccgaagagtcgaatttctcggtacaggaccagttcagcccaaagactaaagcgtcagaagcaggccaatgcacagcaggcagaattgtcacaagctgccttggaagagggaggaagtaacagtttagtaactcctactgaagctggaagtctagacagttcaggagaaaacaggccattaacagggtctgacccaactgtggtgtcaattactggatcccatgtcaaccgtgctgcatctaaataccccaaaaccaaaaagtatctagttacagaatggttgaatgacaaagcagagaagcaagagtgccctgttgagtgccctttacgtatcacaacggatccaactgtactggcaacgaccctaaacatgttaccaggtcttatccattccccgttaatttgcaccacccccaaacactacattcgctttggctcaccctttatccctgagagacgtcgaaggccccttctgcctgatggcacattcagctcctgtaagaagcgctggataaaacaagccttagaagaagggatgactcaaacatcatctgtaccccaagagactagaactcagcacctataccaaagcaatgagaatagtagctcttctagtatctgcaaagacaatgcagacttgttgagcccattaaagaaatggaagtctcgctatctgatggagcagaatgtcaccaagttacttcggcctctgtctccagtcacaccaccccctcccaattcaggctcaaagagtccccagctggctacacctggctcatctcacccaggagaagaggagtgtcgaaatggatacagcctcatgttttcaccagtcacatctcttactactgctagtcgctgcaacactcctctacagtttgagctttgtcaccgaaaagacctggatttggcaaaagtaggataccttgactccaacactaacagctgtgctgatagaccttccctactcaactcaggtcattctgacctggctcctcatccctccctcggacccacttctgagactggtttcccaagcagaagtggagatggacatcagaccctcgtgagaaactcagaccaggcatttcggacggagttcaacttgatgtatgcctactcccctttgaatgctatgcctcgagcagatggactgtatcgaggatctcctctagtgggggataggaagcctttacatttggatgggggatattgttcccctgcagaaggattttccagcagatatgaacatggcttaatgaaagacctctctcgtggatccttgtcacctggtggtgaaagggcctgtgaaggagtcccatctgccccccagaacccaccacagaggaaaaaagtatccctgctggagtaccgaaaacggaaacaagaagctaaggaaaattctgctggtgggggaggtgactctgcacagagcaaaagcaagtctgcaggagctgggcaaggcagcagtaactccgtttccgacactggtgcccatggtgtgcagggatcctcagcccgaacttcatcttcccctcacaaaaaattctccccatctcattcctctatgtcccatttggaggcggtaagcccatcagattccagaggcacttcttcatctcactgcagacctcaagagaatatcagcagtaggtggatggttcccacatcagtagaacgactccgagaaggagggagcatccccaaggtcctccgaagcagcgtgagggtggcccaaaagggagagccctctcccacatgggagagtaacatcacagagaaagactcagaccctgcagatggagaaggcccagagacattaagctcagcactctctaaaggagcaacagtttacagcccttccagatacagctaccagctcctgcagtgtgatagtcctcggacagaatcacaaagcctccttcagcagagttcctcccccttcagaggacatcctacacagtctccaggatacagttatcgaactactgcactgagacctggaaaccccccctctcacggttcttcagaatcatccctctcttccacgtcctattccagccccgcccaccctgtgtccacagactcgttggccccatttacggggacaccagggtattttagcagccagccacattctggaaacagcactggcagcaatcttccaaggaggagctgcccttctagtgctgctagccctaccctgcagggaccctcagactcgccaacctcagattcagtttctcagtccagcacaggaactctgagttccacctcctttcctcagaactctaggtcgtcattgccatcagacttacggactatcagtctgcccagtgctgggcagtcagctgtctaccaggcctccagggtatctgcggtttccaattcacagcactacccacaccgtgggagtgggggtgtgcaccagtaccgactccagccactgcaagggtcaggagtcaagactcagacgggactttcctagggcttctggatttgggcaaacagaactgaatgagcccatagctgcttccttccagctgcctctggaacctaggccgagcatattgctgaggaacggggggtacaaggtgccagaggattgggtctggtggacaagaaacaagacttgtggtcacaattggcctctggccttggagaaagctgtaaatcttgtctgaagcagagactataaagaagtttctccctgctgtcaagggtacattgttgacaagcaaatggtgtttcggttagtaacggttctaagtgcaatgagttgtgttgaagcctccgtctcccatccttgcctgtagcccgtagtcacttgtgcagtgaggacatctttttaaatttaaaaaaaaaaaaaaaaaagttttcaaaggaaaaaaagttaaaagagccaatctcaaagccccaagccatctgagtactgttagggttttatgcacttaagaaaaaaggtaggtatgtaaatgttcatcctaagacaaccattccaaaagcaggtatctggccaatgtgtgtccaccaagaatactgtttatctttgtcttaagatcaccaagaaataggcaaggatagtaaagcttggaacctgcaccaactggagggtgcctggctctttgaagaaaagctcatggtcagctcttgattattcgggagcagattatttgagtagattgtctgagcctccaactgttaccatcctactcccccttcccaagctatttcacagctcagtaacccatgaagtaagtagacaagaaaaggaggaatgagacatgatataggccaattgcattgctacttaccagcttttggcaataaatttcattaggaaggataccgagtggtttgggaatgcttcgaattttattttttctactcccaattaatcaggagttgatgatccatgagcaggaccgcctccatgattggggagcatgcacttgtgactgcagggtaagagtgggaagataggtttgtggagtggcaccgacaggactgtgattgtgtgtgggcctgccccacatttctctgggggatgcttatatgagagtgggcccagtgaaagagttaccaagccacccacacccctaacactgttctggatgagagatgagagcagaccggcttctccccatcagtgcattgtgcctgttgtacacccctggaggagccctggagccagcccaggtggggtacacaatctttttaaattccatatggttgccagcttatttctttcacttgtttactgtaatatctggcgtgtttttatttatctaattttgtattcagttataaccatggtaggggtagtgaatatatgacaggtgtaatccctggtgctgcagtggaccttcttttcttttggacaagataatactgtgagtttccctccttccttccctctaatttgttttccttttttccccagcctcttgcatccccttcttttctaccctgtcctacaactatcatatgcacagtcttctctctttgtgtgtgactgttacaaaatttcacttttcaaaatcgaaatcaggtgtttgctcaaatgaggggagattttttttttttttttttttaaatgctgagacctcagcagtgtacttttctttttgttgtttcccccacaaacccatcagtctgggagagcattgggagtggaaatcatgttgcctgggatgctggtttctttgtatattatataaaacgtatgtaaatgtctctccatttgggctggggtttgcattctccccttggctatttaaccaaggggagaggccagcgggcaggcggccctcaccctgcctggcacgtgcagagaccccagccactctgtgtgggcagggtgctgtcaagaccagacctcttgggggggtaggggcggggggtggggggaactcttggaagggaagaagtatcacttctttctcaagtggagtgtttacaccttgctgtaacatttgaactttcacaagagatgtaataattttgataataaaattcttaaccataataatcat

SEQ ID NO: 18891 - protein, 924 aa, Homo sapiens
MHAFENLEKRKKRRDQPLEQSNSDVEITTTTSETPVGEETKTEAPESEVSNSVSNVTIPSTPQSVGVNTRRSSQAGDIAAEKLVPKPPPAKPSRPRPKSRISRYRTSSAQRLKRQKQANAQQAELSQAALEEGGSNSLVTPTEAGSLDSSGENRPLTGSDPTVVSITGSHVNRAASKYPKTKKYLVTEWLNDKAEKQECPVECPLRITTDPTVLATTLNMLPGLIHSPLICTTPKHYIRFGSPFIPERRRRPLLPDGTFSSCKKRWIKQALEEGMTQTSSVPQETRTQHLYQSNENSSSSSICKDNADLLSPLKKWKSRYLMEQNVTKLLRPLSPVTPPPPNSGSKSPQLATPGSSHPGEEECRNGYSLMFSPVTSLTTASRCNTPLQFELCHRKDLDLAKVGYLDSNTNSCADRPSLLNSGHSDLAPHPSLGPTSETGFPSRSGDGHQTLVRNSDQAFRTEFNLMYAYSPLNAMPRADGLYRGSPLVGDRKPLHLDGGYCSPAEGFSSRYEHGLMKDLSRGSLSPGGERACEGVPSAPQNPPQRKKVSLLEYRKRKQEAKENSAGGGGDSAQSKSKSAGAGQGSSNSVSDTGAHGVQGSSARTSSSPHKKFSPSHSSMSHLEAVSPSDSRGTSSSHCRPQENISSRWMVPTSVERLREGGSIPKVLRSSVRVAQKGEPSPTWESNITEKDSDPADGEGPETLSSALSKGATVYSPSRYSYQLLQCDSPRTESQSLLQQSSSPFRGHPTQSPGYSYRTTALRPGNPPSHGSSESSLSSTSYSSPAHPVSTDSLAPFTGTPGYFSSQPHSGNSTGSNLPRRSCPSSAASPTLQGPSDSPTSDSVSQSSTGTLSSTSFPQNSRSSLPSDLRTISLPSAGQSAVYQASRVSAVSNSQHYPHRGSGGVHQYRLQPLQGSGVKTQTGLS

SEQ ID NO: 18892 - DNA, 5120 bp, Homo sapiens
ccgcttggcagcttgattctcaacttccagtactccaaacactcagtcagaaaagtcagtcagctgctttcctgctggcatgttagtcttggccttggcagctgcaggggtgagatgtgctaatgatggggccaagctgagctttgggggtgaagccatcagctgttcccatctccctctggcggaggcaaaatgagaacagctgggaagcaaggccaacatccactcccagaagccgctcctctgccagcagaggtgtcaacagaattccagtcatgtgagccttccaggagtgtatagtgaattcattccatacttaaacattctagtatacaaagaagattgtacaatggagtaagccaacaatggagacactcatctgtttatttttgtaaccttcagaatgaatgctatgattccatatagattgatttctccactaatttatctacaggaaaatcagacgcctgatttgccactaaaatttggacatgtcagatttagtctattcaattcactaagctttacttccagtttcttagtagggagagtctgctccttggagcataatttattcagctgcaatagatggtactcttgaaacttttttctcacatactttagtctcttttctgtttcttgtctctgctctcctttaaaaaggtgattatcatccttctttctccctcagtgctgctgaagactaagccattggttatagaggctcagtgagaaagcaatttcaaaagagggaggcagaaagggctgggataggatatggtctgtaaagctaaatcaagacaactgttttcaagcacaaagctcctagtagaagcatctgcttctcttatggacttcagtgacataaaataatgagatttcttcagcttatctcccctgatgttacttccttatggatttagtgggtcaagagtgctgtgtgttctggcgttgtagttataaaattgacaggtggcttggatcatggccagaattctggacttggagtgagaagtggctctgagttctggcttggcctctttatggctgtgtgaccttgaggaacccactaaatctttctgaacttagtttatttgtcaacaatgagcaaggatgcagcctacctccctgggttgtggtgaattccaaatgagggagaggttggggaatgtgttttgtaatttaaggtcttctcttttgatggtacagggggcacatggtatcacagttcatatgttcattcagtgctgaggtttgtcctcatgccttgaacggcacaagttctcagcatccatgagccaccgtccccttctgctcatggtagatgggtgtccaagttaatcccaaagcttgacagagggggtggcagagaattgggagaggaaggcagtttctattcgtttttctcctaccttaaatctcatgtttccatctttgttgtttatcagtctaccattaggggcatctctgttaaccaggactatttgagattgtgttaataatgtgaactctttcaaatatcatttacttatagcacacaaaatggtcaccagtatccttcttctctgctatatgggactcactgtgggctaggcataagggctgtagagaatgaatggtagcagatgcccaggccaggggcatgaattttcctagccttcagcttccactggctttttgagaaagagatgtgggagggaggataagcgtagaatggcaaggcaaataaaatttaacatgcctctcagggtattgggttggcatgaataagaattgctgcagaaataggaacctcacatttgtgggtgaagcagacacataagctcttgacttatatcttaattaccagttagagcaggtgattgcagcagtaaagcccgttaagcactctacatccttgtggctctaaacagtacacatttagaacatccagaatctgacagaaatgttccactctaagaccaaatattggtggtgttttcccaatttacagcaaaacgtaagtgaatggaaagatctctcccacactactaagattgttcatctgaatctttctgaaactaagttgcagctaccattatcttctgacttgcacagcagcaaatgaattttctaaaatgtttactcagttcagtgcatgatcagacaacacccaagggctcctggtgacaggtttatctgtgtacctggaaaacaatcacatttctgagtggtaattgctctttcttcataggatagaattgaggaattccataaagggattttgcctgtgtggtttctgtgctagcactggttcagtagcttctcatacattctcaccatgccctgggaggcaggcactatgaccactctttcttccagataggaaagccaaggctaggacattcagcttgtgcagttatacagctacaaggtgacgcagctgagattatgcacatgaattactgcacaaatagggaatatactagaaatgggacttacacgaataactaatagtgatgacaccggcatttaacaaaacattcagcagactctcgactaatccctttacatgaattatgtggttaaaatatccctatggcccttagaggtatgggccattattatttccattttacagatgaagaaactaaggcatagagaactcatgatttgccttagcccttgcatcttataagaggctgagccaggattgaactaggcagttgattttcagggcccacatgctaaaccactgggctgccaagggaggacctatgatgtccaggaactcttccatactccagaccctttgcagctatctcagcttgtgtttatcttgggacattgggatttgaggagagaacctaggaagacactgagatagaacaatacttgagtctttagctgtgtgaatcccaggaacttgtcctgtgggctctgacctgcaaggactggcaggaaaaacaggactggagacccatttgcagggcctggtatctctgacctttcattttcgcatcaaaggaacatgtggacttaccagctaaaatttattcttcctgaaggagaaacttactgtttaataattaagtatactatcttctgtttcctctcacaaataaaatgcaggactcaacctaataactgctacctatgatggctgtagaaaatacttgtaaacatgataaatgcacatgcatgagtgcatttgttatttattgctgtatgacaaattgccgcaacttagtggcttactatcacacctgtgtacaatctcacagcttttgtgggttacgaatctaggcacaacttatctgggtcctctaattcagcttctttcaccggtttcagtcaagatgttagccaggactggatctcattcaaaggctcaactgggaaggatctgctttcaagctcacagaaacatggcagaattcagtcccttgagttgttgaactgaaggtttcagttcctagctggttcccattttcctaatcagtattctctccaatatagaagcttgcttcatcaaggcctgcagactgagaaggcaatataatctgcaaataagacagaatcacaagttgtataatccaatcatggtctgtgaatattgctatagtctactggttaaaaacaagtcactaagtctcttaacctagtgacttgcttaattctaaccctaccagggttacatatgagagtgaataccaggaggcgggggcactgggaaccatctcaacagtctagcacagtgagttaattagataatcagcattgtaaataccaggaatggctttgacaggtgaaagcgtctgttttcagaggtgtccactcactatgtacaggtcctggagctggcagcagcatctgattggtaaggtggctctgtttctgcatttttgttgcttagctgtttcatgtccttttactgcagtgtcttcatcgcctttgcctgacagttcttttcccactctcactccaacacttggctgaactcctccttggcttagacttcacttcctcacaggcagccggttcttggtccttcccacccaaccccagtcaaggaaaggtccccctgctaaatgctctcaaaatgctatgtctctgtcagagcacttatcacattctaatcaactgtttgtcttctaggttagaatttaagctctgtggtgacagagaccacatccatcttattctctgttgggtcccccgtgcctagcacatcacagctgctcaataaatattggcatgatgagtaaatagtcccacttggtgtgctgctttttcatttcaacaaatgtgattcactaaagctctactcttaaattttttgtgtttgtacaacctttcatgtaaatgaattttcacatttggaaagtctttttgaaaaaaaataccatgtatccaaatatttgatatggaaaaggtagttagtatatattagtgatacgaaaggaacatcttaaaggaacatcttttggaaatactatgatgctgaaatggatgctaattttcatattgggtagaaaatgtgagctgatagtctaataaaaatcgcatgaggtctctattaattttagcttgttcttatctccctgagaaatgtacagatgcgaggatgggcatgaagaactctatgcatttgcttgggtttggatattctatagctagcatttagtgatctgataaacttaactatatgtttactttttttcctttttatttcctctaccctcattttaaacttttgaagtgattttagcctaaatgagtaaaaattcaattggggaatgaaatgactccttctaaaacagagctcaccttctgcaactacaaaggcaaaaaaaaacaacaacaacaacaaacttacatcaggctgatttgcaaatcacaagttttactttgttttatgctgctttcttacattgaacttggttattttatttacatccacaatggatagtttcagtggtttgatgaaaatcatttttatgtacaaaaattggaagacttaacatgaaaggttattattgataaactcatagtaattttaaaagtacattccttaaagttgtaccctatttgttgttacaatacatttttcttttggcggtttgacttcagtcctttgt

SEQ ID NO: 18893 - DNA, 4761 bp, Homo sapiens
  CDS (2783)..(3091)
tacacgcctgtagtcccaactactcgggaggctgaggtgggaggattgcttgaacccaggaggcagaggctgcagtgaaccgagatcatgtcactgtactccagtctgggcgacacagcaagaccctgtctccaaaaaaaaaaaaaaaaaagttgggggaagcattccatgtgcagatggagggactggcccgagtcaaggtgggaggcgtgcaaacgcaggctctcacagtgcgtggccagcagcgtgggccccggcacggggcatggagcagagtagacagtgctgagtcctgctcactgtcctgtctggggagtcatcacatctactggaggtggctcagggcaggctccatctcttgcccagggcagcagggtgggccctgtggctgtactctttgttgctgccctaaagtgccaagagaacttgttttggaatcataaatcctgagtttgcagcctgttgctctcaactcttccctggttgtgtgacctcaggcaagtcaccctttctggtttgttttcccatctgcaaaacaggatgagagccagtaaggccccttcccgccctcaagttctatgtctctggtggctttaaaggtggagtcgtttctgctgctcatctgcagtgccgagtggcagtgcctcatcccactctcagtccgtgacctggagggtgggtttataccttggaccacagtcagaggtgccgggttctcagcggcccccatcttggtccaaggctgggcctctcacctgcccctctctctcccctcagtggtggctggacctcgtggaagcccctctggctgtgtggctatggactcacgcagagcactgtcggcatcatcgggctggggcgcataggtgaggctcccaccggcccgcttgcccgccccggctctcacagcgtggtttgcatccctggcaccacgtgtctgaaggctgagaagacccacatgctgtcagggcactttgcttgcagtagagatatctctaatgagggatacagctttgtaaaacacaggcaaatacataaataaaccaaagcaggattccttaagaactcaccaggtgataaaagcaagttgcctaagggtcagggggcttcatgattccggctccataaagaacagatgaagactacaaatgtgttggggccgttaggagtggttaccgtgagagagcccattcccccgacacctactccggcttgcgttctggaaggtacgtgactcacaaagccctaactcgggccggagggctcagtgggcagagttgatctgcagttctgcagatgaggcagagacacttttcttccagtggcccttatttggagaagcctggcagaagggcgtgagcctagccaagcagctatctattggtggttctctgtcatcctgcctggtgcaggggtgcgggtgagggtggagagtgtggagaacctgtctagccaacgaacagccctgcctctcactagagagttgcttggaggaacccaacagctttggggcacgttctgagcctgaaaatccaactgtacaaatctgtctcagcagcagcttacatgaaaattgtaagtttggggtgagctggcagtttggcagtgccaccaaaaagtcaaatggggtctgagactgcattcacagaagcagagggtccaggacaaaggaggggactgcttgaccaggtgtctcccttgtgaaaacctctccagttctcagaggttaggaaaaacctgagtggctttccagatggcttggaccatgtgaggacagcatcagccagtcacagcctcaggggagctgaggtgctgtctccagatccctggggcagtgtgggctggctgggggctagttacagtggggcagccagccccccacccgctttggagaagacaggagcaggcaactcgggctgtgctgatgaaaagggtctgccctgagggccgctgttccagaaatgctgggtggtgtccctaccctttgcgggactgggaacgagacatggactctccttgctctaggccaggccattgctcggcgtctgaaaccattcggtgtccagagatttctgtacacagggcgccagcccaggcctgaggaagcagcacaattccaggcagagtttggtaagtgaagccttgatttccacaggagcctatctgtgcccagttgagaggctgtattttctctcaatggtggcattttcaggcagagggcaggagctccaggcatgtccaggggctgctgtctggtagatgtttaatctacctgcccctggacactggcccactcagggagcacagggacttacccaggtcctctccgagccagcagagcagtccagggctcccgtctttcagagtcctttgttaccattccccattgtgggcggagcagcggggatggtggtgggtgtgaggaagggctgggcactttcactgtcttttccttcataaactggcaagcaataccctagcctttgtgtgcgccccttagtccaggcggatccagcacctggcgggtccacagcctggtgagcagatggcaggctggatctcaagcattccccacgcccctgggcactttgggccctgaaggtagttaaagccagagtggtccagatcccactgtgtgttatttgactttgtgcactcatgagagttgtccaggtagagactcggccttcaggaagcatcttgggagtttctgttagggagtcgggagcaaggggctggtctcccgccatctggttgtccctagcctgggactcagtgcctgatggagtcctgccctccctcagtgtctacccctgagctggctgcccaatctgatttcatcgtcgtggcctgctccttaacacctgcaaccgagggactctgcaacaaggacttcttccagaagatgaaggaaacagctatgttcatcaacatcagcaggtatcctagggccaccttacccagcaagcctggagaggagccatccccactgctgccatctggagattttcttccccgtgggttgttggtgagaccccaggctgagcttgctggtttccataaaccaaacaaccaactcagaaattcgtggtaatacacgagacctccgtacagggaagaagagccgtcagagtgggcctggcctgtctgcttctcagcagtggcccccacccggcggggcctggcacacggcagcgtggcttcagggagtgttcccagggagcctctgcaggcccattatcctccaccacaaagggctggacttgaggatctgaagggccctctggaggccgcctcccacactgctgagcctggctttgtctggctgtggttcagtgatactttgaaccttatgctcctgggcggacagaccctaaaactcacgtggtcgtagctcctcacactgtccctaggggtgccttcaggccactgggcatgtatggaggtcagaccttccttctctgccactccaagcccttcctagctggtgccccttgagcctgtttacatcagtttaggggaagggggattgggtgaggtcatcctgaggactcgtccaccccaaaggtacctgtaattaccaacatttagctacaaaacaggtgacctgggaatggaagagtgaaacatgcaggaccacagggctcgcactgctggctggcagcagtcacagctgccgtgtactgggtgcctgcatgtacccaggacagcccaggaccgtgtattactcattagtgcacaagtattacttagtgcacaatatacagtctctagaagatgacttcttgcctacagtcgccgctccctttgatggctgtggttaggggtgtgctcgttcctctgccctggtttagacaggtacctgatagcacactgtggtgcttctcagtgggggtctgggggtcaaccagatcagaaacacttggatggggcctaacacagatgcccttctgggccctgttcatgcagtagagcatgtaagaaagctttaatcctcccaacatgcctgggagttaggtggtattctccttatctcacagagtagataatttgagacacagataattcgaggcacagagaatttgagacacttgcccaaggtcacacagctagaaggaggcagggctggagttctctgagtatataagacttacagacatactgtaagtatacctaagacttactgctttaaaagtcagtgccaagtgagtggaaaaattcattctgtaggttgttctgcctcaaaggtggcctgggcggagggatcttcggggtacccatgtcaccactgtcattcccaggggcgacgtcgtaaaccaggacgacctgtaccaggccttggccagtggtaagattgcagctgctggactggatgtgacgagcccagaaccactgcctacaaaccaccctctcatgaccctgaagaactgtgtgattctgccccacattggcagtgccacccacagaacccgcaacaccatgtccttgttggcagctaacaacttgctggctggcctgagaggggagccgatgcctagtgaactcaagctgtagccaaacagtagagatggagggccgggaagcaaaccgtgccctggtattgtcagccacacccaggcttgatttggatccacaggcagagccaagggaaggtgtgattctctgaggaaagagtgattctgatatatgtacttgtcacattggtgttggacacatttgcgccaaaagtatggtaattctattattaaataattctctgag

SEQ ID NO: 18894 - protein, 103 aa, Homo sapiens
MESCPPSVSTPELAAQSDFIVVACSLTPATEGLCNKDFFQKMKETAMFINISRYPRATLPSKPGEEPSPLLPSGDFLPRGLLVRPQAELAGFHKPNNQLRNSW

SEQ ID NO: 18895 - DNA, 5219 bp, Homo sapiens
  CDS (600)..(968)
gaatgggctcctgcctgcctggtgccacatcctgccccagctttgagggctgaatcctctcagctcagagaagagcttccctagttttgcaggcgcacggaggcctcccacccgtacacctgcctctgctctccccctggccattgcaatgcatgcccgggatctgggtttaccctgcagcccgactcctccagggcaggctccttccgtccttgggtccagcagcctcccccctccgctgggtactgagcatctgaaaagtctcagatagggccctacacctcttctcccttctcaagtgctcagcccaggggtggggcttgctgcttgcaaagagcagcccaccctcctgtactgccatcctattgcctttgaagaaggaggtcagcctggacaggtgaactgagttgccttcagaaaggcctgtctcaggcagccgcagcaggcttcacgatgtccatgtatcctgtttgcctgctgccgtctctcctctcccaagaggggaggtctgcgtgttgagccagggaggaaggagcctgcagcctgctcagggtggtggctggtgactgcggggccagggcttgctgctgtctctcggaatgtcctgcatgtgggtctggctgttcctgctggcactgccctcttctctctcccctcctttcccactctgccctgcttgcccgtcagggtctccggatgcccctgctggaggcagagaagcgttctgtttttatcatcgtccctgtcttggtcctgtccgtgctccccatgtgctcccaatcagttgtcttcgttcctcaacatcagggaaagaaaaaacagcaacacttctccctgtcatcagctctgctgtctccttgtcaggccttgggacgttctctgggctcagtctagggtcgtgcctcatgcctcatgcctctctgggaaggttcccaggggcgccgcctccatggttggctggtgggttttaaaggggaaggttgggaggaggcctgtggaaggaggagggccgtccacacccgtggggcaaagcgtgttccatgaaaccagtgctgtgcgtgctgggatgaaagcctcccagcctctcgtgctgaagggaaaggtggaccgaactggcttagctgctgtggcaatggggtggggggtgagtcctaatcagaaggtgggagaagagaataacaaaatggaactccgccccctgccgccacatttccttaagttttaggagttggggcctatgagtagaatttgaaagaactaccaaaaaagcttatttttggaaattaagtcagctttgcctgtggtttggctaggaataaatatttacctgtgtgcccctacagagatgacacagacccaaagtgggacattgagcaaggcacaggctggttcccctcctgtcctctgtcatcattctgtgagtgccaccatcaccaggtactgtggcctgcagaaataaacgaggcaccaaccctgccctcagggaccccgtgtcttcttagggacagaggactcagaaacatctgtgtccccgcatgttaagtgcatgcacacagtgctgagtctttgcagagaagggccatggctccctgaggagaccaagaaaggcacatagaagtgacttctcagctggcccttgcaggatccctgggtgcctgtacctctccagtccagctgagcaaggaggctcaggaattaatgaagatggggcttgtgtagcacgatggttctaggccatcccttttccatggctcaagtccattgaaggcagcctccaaaatcagggggttgcctgatcctcctagtgccacaatcccagtcctagctagaacttgccatggttcttctccctaaaagttcccaggggacaggagacaggtgttgcttttctaatggagcgggacctcgcatggacggggccctccaagcctgctaacaccctgttcgcactgactcagccctggaagagaggccagcagtgatgacctcgcccctgtacctggagatcatcatctattgcacaggggccttcctcatctcctgcatggtggggtcggtcatcgtctacaagatgaagagtggtaccaagaagagtgacttccacagccagatggctgtgcacaagctggccaagagcatccctctgcgcagacaggtaacagaaagtagatgggggatttgcacactcagcaccacctctctctctgggcctctaatgccctgccctctccattgtccctaatttatagctttgggccttattttctggcttctgggcaaggcacagaggaatatcatgaactaagtgctctagagtctgtttcaagctagtgtagcccgtgaatttcctgcaccctccatatcacactgcaagtcctccggactcctgggacatggattgggaggaagtcctatttggacagaatgtgcagccaatagcatgaatttgaactgtccccaagggctgcttagaagtgcagagatgcagggtagagaagagaactgtttgtattagtccattttcacactgctgagaaagacatacccaagaccgggcaatttacaaaagaaagaggtttaatggactcacagttccacgtggctggggaggcctcacaattgcagaaggcaaaaggcacgtctcacatggcggcagacgagaagagagcttgtacagggaaactcccctttataaaatcatcagatctcgtgagatttattcactatcacaagaacagcacagggaagacctgcccccatgagtcaatgacctcctaccaggtccctcccataacacgtgggaattcaagatgagatttgggtggggacacagccaaaccatctcagccataccatacccttgtcccctgtgtgcccacccttccccacgggaggaaatggtacagatggcacaggtgtgtgcaagaatgaccgttccctcagaagcctgtgctcattctggaaggtgctttgggagttaggaatccataagctaaggcaaagtatttgcaaagagtcaggagaacagagttgttactgcaatgatcagttataaaatgtcaagctggaagaggtgcatttggtctgcttattttaaaggtgagtgaagtccagaaaggccagcttgtggcagaaataggtcagtcctagaagttgggcctcctggcctaccatggtctttggaccactctgtgttgaggaaagaacatcagatacacagacatgtgcctctgccattgttgggaagccctgactaagaatgggaaggagtcaccccgtcccccttccttgctctagggtgaccccacacttccttgcaggtgtctgctgactccagtgcatccatgaactctggggttcttctggttcggccatcacggctctcctccagtgggactcccatgctagcaggggtctctgagtatgagcttcccgaagaccctcgctgggagctgcctcgggacaggtaataatactttgactcccaactttttgaaggcattccttgcttgctattctagtggtggaaggtgtgtatactaacaccttctgggcggtgaaggttcatgaaatgcctgcagaaacattcattccactttctgctcgcagttgggtgaaatacagagaggtggagatggggtgcctctcaaggtttgaacttcaccagccccaacttatgccactctctgtttcccccgaaagactggtcttaggcaaacccctgggagagggctgctttgggcaggtggtgttggcagaggctatcgggctggacaaggacaaacccaaccgtgtgaccaaagtggctgtgaagatgttgaagtgtaagtgatgcttctgtccttgcaaagaaaatcttgtcccattcaaagcaaacagcaggcctcgggcccagcagaacagcttctctggtgcctttgctgcccacacctgctccgctgcctgcttggggttacctgggagtggagggggtgttctgcaccttgagattgttctatgacgtcactctgttccttggcgtcaacctgggttgtggtcaggtgtttatcctggatccatcgcttgcaggctttcctcaccacatccctgcccactcactaccacctattgcaacaacggctcccatgagagggaagagaaaacaagtttggatgaagtggggaggagagaatcaagtcccagggaaaagcagcccctcgacacataccccactcccttagcctttatcctgccctcctcccttcccaagtaaatgagtctcaacgtgttctttaaagcggacgcaacagagaaagacttgtcagacctgatctcagaaatggagatgatgaagatgatcgggaagcataagaatatcatcaacctgctgggggcctgcacgcaggatggtgggtgccggccagactggctttccctgcccagcggggagaagatctgagctggggtatcagtcccaaggcctctctcagccacagctagggaagggggttaagagaggctgctttggcagaggtttaaaatgtgttatctcgggatctgggctccgctcattggtgttcattcaggaatacagatacctagattcacacacgtggtgtgttaacagaggcagctgagtaattatggtctaagagcgctcaggctgggtgcagtggctcatgcctgtaatcccagcaatttgggaggccgaggcaggaagatcacttgagatcaggagttcgagaccagtctggtcaaaatggtgaaaccccatctctactaaaaaatacaaaagttagccaggcatggtcacgcatgcctataatcccagctactcaggaggctgacgcataagacttgcttgaacccgggaggtggaggttgcagtgagccaagatcacgccattgtactccagcttgggagatactcccgctgtctcaaaaataaaataaataaataggccaggcacagtggctcacgcctgtaatcccagcaccttgggagggtgaggcgggtggatcacttgaggtcaggagttggagaccagcctggccaacaggtgaaaccccatctctactaaaaatacaaaaagtagccgggcgtggtggcgcatgcctgtaattccagctactcgggaggctgtggcaggagaatcgtttgaacacgggaggcggaggttgcggttagccgagatcgcgccattgcactccagcttgggcaacgagcaaaactccatctc

SEQ ID NO: 18896 - protein, 123 aa, Homo sapiens
MSCMWVWLFLLALPSSLSPPFPLCPACPSGSPDAPAGGREAFCFYHRPCLGPVRAPHVLPISCLRSSTSGKEKTATLLPVISSAVSLSGLGTFSGLSLGSCLMPHASLGRFPGAPPPWLAGGF

SEQ ID NO: 18897 - DNA, 5538 bp, Homo sapiens
  CDS (108)..(491)
ttgtttattctgttcactgctgtatatctgcagccctgggcacgtagtaggtgcttgataaatagttgttgacttgacttgttagcagctggtagaagcttcccctaatgtttcattctccaggctttattttgagtgaagttgaggccagaaggcctcagtatcctcttccagggatgctgggaactgtagactggatgaccgtgagcttttcagtgtgtgtgtgtgtgtgtgtgttttttttttttttttttgaagctggaagaaactgtacagaaaagaggcccattttgcagatatggagaccaaggtccagagggaccagggccttgccttctacggcacctttgatgggagaatccgtaggcttgatgttgaggtccttcggtttgtctttctgccttttcattgcaattccagggggagagggaccctctggcctcacccttggctctgacctcagtgcggtcagtaaagtctgcctttccctctaactttcacctctttctccccactgcctacgtgcctgccctctgcccactgaaagtgggagcatcagaagggagctgtgcccccaacccccatgtgagggacagatcagcaaaagcctcaaagtccgtgggccgtgtgtctcccatctcattgtggctgggcccccgggcaaggacaccgtgcctcgggagtgagtcactctctctctgtgccaggcaggagctccagggactaggggtgacccaagagtgaaggcctgatggggaggaggacccggcatgacagcccttggcttgctgggggaggagagtggaaacttttacatttgtttctcgctttcaacccagtaagtaggaatcagcctaacagatcagcaagagcctcaaaccttggctcgttctgttcaagaagacagaaaccacaaaggcaaggagagctggagttggctccataacaaagtgaccctggagcgtggaaaagcagaccagcaaccagcctcgccataaaccagtctgaaaggcgagtgggtggcctgggaaaacgcacttgtggcccagttgacaattgaagggttaaatgaccttaataagccgaagtagctgtgaatcagtgagaaactgtgactgcctcaaggggaaaaggtgcaaagaacaaaagagaaatacagtgaaaaactgtcagcttctcaaaaatcaaagagatgtaaattagaacagggggtgcagtttttcacctggagaactcgcagaggtttaaataagatcgtacattttacgaagaaggcatctgtagcacccttatgaatgctttcccttctgggtgcataatcgccctcctctaaattggatgctcttggggtgacctcacctggttctctctccccatcaccctgtatcccttgagaatatctgtagtgacagctcctgagcacctgttgtgtatcatgcattctatacatactgtctcattctgggggttccattgttccacttcgcagaggcaaaaactgaggcgcagaatgatgaaatgacttcggcgaggtaccccagtaggtaatggagctggcatctgaacctagggtaaccagcctcaagcccatgctctcctttttttgcttattttccaccactgtttggtccctggctctcccagagggacatggcactggctgggcctcaggggatcctggcttctcttgaattcagtgttaccttccagctgccgagacctgcaggaactgattccacaggacagtcctgccaaggaggcaagcgggccagagagaggcggcagcaactttctgacaggtgccggggaagtcccgatttgcaatgcttgcccgtttctactgtgtaaatacttacactatggccaaagtgagatgcttaaatgcagagtttggaaaagatgggcacagttggcttctgggagctggaaagagctggcttagccatagcttcaccactgcccaggtgggtgactttgacctggtgtcaacctctctgagactcggttttctcatctgtaaaatgggagcagtatttgctgcatagggtggttgattgtgaggattaaatgagtgaatgtgtgtctagcgcctgtactgtggtaggtgctgtctaagcgttcgttatgagtgcacttaactttcattcattcattcattcattcattcattcagctttcactaacttcttcagccctccagcatctgtctgtcaaagccaactgtccaccaggcctgtgctagaatcttccttttccctctctcccttggagtatcaatgggggaagggggatggcctcaccccttctgcagacgggcttgtctggatccttgtttgctgtgatttgagccaaggacagatgtagtttttttgtgttttttagaaatttccacttgtgtggctgcctcccttggtgtagccacagagggggtggagaaggcgcatcctctgggggtcgtggaccttccaaaagccaatcctagcaccccgtgttgtcagtttagaggcagtggcctgggaactggcagtagacttccgggatggctgtcgtggggccagtgctgtgcgggggaagcacactcgcggtgaacctggcttggctgcttctcagtggactgccttgggcaaaccactgctccgttctgagcctcggtgtatttttttagtctataaaatgtgctaacaatggcctcctggcaggtggtgggaccgctagttttgaagaagccgaggtggaaacgccagggagccccaccctacccctgtgggacattgagagtctccagactgatccccttcttcctggaggccccagcaggtccctgggaggagaaccagggatggcctgaggaaaggctctccctggcaaaaacgcggtcctgtttgaacttggttctctgttaacatgtgctgaaaggagacgccggtgctctgtctctagcgatccctggttccaggtccccattctgttcccaatccaagcctttgggtcgttagtcctccaccaaggccaccagtgatcaggacctctgtttccagagccctcctgtgtcccaggtgcgtgactgggacaagtctgagaaatgatcacagcccagaggagcctgcggacacgtgatgatgaaatgtcccatggggtcgtgaaacagaaaagggacattagagaaaaaaactgaggaactctgaatcaactgtggactttagcaataaaatgttttaatattatttcattagttgtaacaaattcaccacactaatgtcagatgtaaatagtcggaaaatgaggtgtgggtatgcgtatgggaactctaggtactaactcagcagtttttctgtaaatctgaagctattctcaaaaataaaatctgttaaagaaaaaaaagacagacgggtgcagtgactcatgcctacaatcccagcatttgggaggctcaggtgggaggattgcttgaggccaggagtttgagaccagcttgggcaacatagtgagaccctgtctctagcaaaactaaaaaattagctagatgcagtggtgtgtgcctatagttccagttactcaggaggctgaggtgagagatcttttgagcccaggaatttgaggctgcagcgagcagggatcacgtcactgcattccagcctggataatagagtgagaccctatgtcatttaggaaagagcccagcgcagtggctcacatctgtaatctcagcattttgggaggcccagatgggagcccaggagtttgagaccagtttgggcaacatagtgagatctcatctctaccaaaaaaaaaaaaaaaaagaaaaattaagaaaagaaaagaaaaaaaaggccttccaaagagttgcaggctcacaggggatcttggtacagacgagcaagcggtcccttccttggtgtgtgtaggacatggcttagtgagcacgtcgtgcaccttgcgtgtgtcccattcagcaccatggctgctcataccctgcctcgaccgtgcgcgggagccctgcttccctggctggaagcctctcccttgatgcccaggagaaatagcctcttgcactaacaagggtggatctgtgcttaaattacctcttacctggttcatcccaactctcttccagccctttcctctgcccccacccagctgccctcagccttcagcctcactggaggaagggtgtctcggaagagttgcatcatgagacccttggtggagtcgctcaccaggacggccttggccccgaccctggcaccagcccagggtgactttgatgtcgtgttctggcgcgtccttgggcccatttccctcctgtctcccgggggctcttttgcatgttcttcccaaggcttcagagaccttcagctccgcgtctgaagcagccatctctttcttggatctcaagagtggtgatttctggcaactgcctcagactccatttctcatctctgtctacaaaactagcctggagttgggctgtcgggttggcctggacatcctctgagcagcgattggcccttgccctgtttctgtgaatgaacgcggtcgctcttggaaagagcccccaccaccttgcagatgtgctggggtagggtgggggcgtgcgaggttggattacatgagactttgggttctttcctgcagtcattcctaagcggtacttctctgcatctggcctttaacagtgagtggacggggccagtgttcttggagcacctactgtgtgcttgctctgttagttctttgtttccttccctgacgggagttaggccttgccacccttatgttacagacggggagactggggctctgagaagcgacttccccagggtgcccggcccgcacatggtcgagcgggggtctcaaatcccgttgagtcttacttcaagtccaggctccttgatcgctggccctgcttgccctggtggcccacagtcccagagtcagtggcgccaaggtccctcaggctggttgtgaaatcagtttgagtgcagaatgacggcggttcacatcgagcttggtgcccaccctgctagcctgcctgggacttccccagcattagcaccagcatcagtcctgcctcccaggaaccccctccgtctcagacacacctccatgattggtccctgcctcacatcccagtttcttcaaatatcagcaagtttcacactgagagagaaatgtagataaccaataataaaatgaaatgacctctggtccctattgtcagagccataatagtgacattacaaaaatgcacctttagaccaggtgcagtagctcatgcctgtaatcccagcacttcgggaggccgaggcaggtggaacacttgagatcaggagttggagaccaggctggccaacacggtgaaaccccgtctctactaaaaatacaaacgttagccgggcgtggtggcgggcacctgtaataccaactgttcgggagggtgagtcaagagaattgcttgaacctgggaggtggaggttgcagtgagccgagatcgcgtcactgcactccagcctggacaacagagctagactccatctc

SEQ ID NO: 18898 - protein, 128 aa, Homo sapiens [sequence omitted]

SEQ ID NO: 18899 - DNA, 5017 bp, Homo sapiens
  CDS (1230)..(1724)
tggagagcctcatccttgaacgtgaaggacgtttgaagactgtggcatgatcacaggatgagatcacagggaacttgagtttctctcctcctctcccttcacagttatttcactgagggaaatccctcccctgcccagaatgaaaactctagccaactcttgacttttccatcactccaaagtagttgaaagtacattagtctccacagtggcaaaacagtgtgcaaaagctaaataattagaacagccagtcccatgtgacagtcaaagcttctaactccattcaaagttgcagccattcccctcaagggctggcagggaggggaggggtaagagaaacaggaaggttcttactgagtttggtcctggtgtgagctgcgtcacactccctgcagaggtttcaaggagactctctctctctctgtctccatggggaccttatttgaattcttctactcttaccccagcctgccatctccagctatcctcccctgaagagcccttctgctgcgctggattctggtggccatgtcatctcctcggccccgtgggagtctgaagatctggctgcagcctcacctctgaggtcctgctagttgccacctcttaaacatgatctgaggctcccatgcactctgacctgtgcccacatggggcccacgggaaacacgctggcaagcaaactgtgggtgtgcagacggttctcagggctgcagcacctgtcctttgctctgcccccaaagcaaggccagcccatcttccatcctctagtgttccttggtggggccctgaccacagtccaccaggtccctaaccagaggggacacacaccaggtgtcctcaatgtattgccttgaaacagttgtgctgggactgtgatggggggtggccatgtagccacccccaccacccccaagccactctctccaaggaaatcctcctaaagatccctttacatcctccatgtggtggggaggttctagagttgggtgcatgtgtcttcagctactgacaatgcagaccttagttggcacctcgctctggcctatcctgtttgctgttcttggcgctccagtgaaactccccatgggccatccagttggggtgcagtgtggccacccccttgcaggttcctgccttgctggagagcacagggccctcctggctcttgtaaaacactccccatggtacagagaggccagcagtgatgtgaggcccaacctccctccatggtgttcccaagcagctccctttctggggtcaaggggtggcaaagacagtgcagcgtccaatttctgactcaagccgggcctggctatcgcagctctgcactgtgtgtgacagcaaggcaactcacccagtgccgtggcagtgaccgtgtccgaggaagcctcctcacaccctctgtctcaaggactctggcatttagctggacttgctgtagctctgagcctttctgccattgccatcaccttgtcagaaactcaggccgaatctgcactcagagttgtgcccaggcagttgagccaacacttgctcagcgatattgtcacatgacaaggcactgtcaccactgggcatcgtgggtagcgcagtgtcggctggatggacccggagggtgtctgtgtcatgctagtgctagtgatgggagccccgtgagcccattgcccgccctcccatgccctcagcagctgcctggggacagccaatggcctgggtgtttctgaggctaccacatggcttccaggaaactcgagaacctttctctcccttgcctacactcttcacacaggcctgtgctggccagcggtggggatccggcattcctatcttaggtgcagagagtgactgactcattgcaggcctgggagataagactgatggcccagccagcaagatgtatggatttctcagaggcagtggcctctgtcattgtcctcaggaaatgctggtgattctggtggcctgaggtcaatgcatgtcaacgtggccaacttgccttataaactttttttctggacaattgcgtgcactgtcctgtaacagtgtcctgttgtttatgatgcagaaataggtgtttttaaagcctattgattttggtactattaatgtggtcaggaactttctcggtctttcttgtttggggtgagctgtggcttcctaaacaggaacccaagacacccccaaaagctgctcaccagcactgccagcctccctcttaccaagtagcacccgttcaggacattctgcgaaaggcatttgcccagaagttgggaggaaggaaatgtaacattttggggcacctaccatatgccaggcaccaggctaaacgtgttcacacaaattctcttactaaccctcaccatccttctacaagacaaactagtatcttcatcttggggttcaagatgaggaaatggaggctcagagaggttgaatgaatgccggtgcctggatatgaaccccatctgcctgactccgcaacccaggcaaagtctttccttgaacttcccagcagccactgcttagacacagcctccacaaccatggctcagcagcaaattgcttctctgacctcactcagcctgtgtgtccttgttgagtgaggcattcaggaccctggtcccaaagtggagaaagtctttcctactaggtcatagctacacctgcatgtgggtgctgtgccttttgtgtagtgaacttttatcaccagcatcctcagcaatgacatttgcagagaagccagagctgaggcaccttggtattcttgggatgtgactttcctgaatgtttaagggaaaatgcccgaaggtacagagagcttggtttctagtaaacaataactgtcttgcttttaccccccttcatttgctgacacatacaccagctgaagaagcaggcattggagacacccccagcctggaagacgaagctgctggtcacgtgacccaaggtcagtgaactggaattgcctgccatgacttgggggttggggggagggacatggggtgggctctgccctggaaagatcatttggacctgagctctaattcacaagtccaggagattttagggagttggttcttatcaaaggttggctactcagatatagaaagagccctagtggtttttttctaataccatttctgggtaattcctaaggcatttagtgttctgaaagatgctagccttgtccagcctgggagttgagaatgaatgtctaacagaaactctaggccggacctggtggctcacgcctctaatcccagcactatgggagacccaggtgggcagatcacctgaggtcaggagtttgagaccagcctggccaacatgtgaaatcctgtctcactacaaataaaaaaattagccgggtgtggtggtaggtgcctataatcccagctactcaggaggctgaggcaggacaatcgctcgaacccaggaggtggacgttgcagtgagccgagatcgcatcattgcactccagcctgggcaacaaaagcaaaactccgtctcaaaaaaaaaaagaaactcaaatatgtgtgacaggcgattctcactgcaggctgccctgtggctgatccaggagcaaggccttaaccatgtcatccccaagcgattgcttgtaaactttcttctgtgcagccttcaacccttattatgattttcttctcaggaaccaaactgctgtattcaagaaaggcagctttgtgtaatcatttatcataaatatcttaagaaaaatcctagagattcctaattttaggaaatgggagacctatggtactgatataatgtgggctgggcttgttttctgtcatttgctagataaatgaacttgagagcctactgtaaaatgtggaagcttctagattgcagaagggctggaaagacactgttcttttctcccgagtgatgggatctgtccagtatttagagctgcctctgaggccatctgattctaggagactctgcctcgttgaggatattttgaggcctaactacacattcctgcccccagagaggtcacagcctatagcaggctgatgtttctcatgtcacatggcacagaaaggcacattttcgttctcaggctaacaaagagcttcaaaaactattagaagggacagtggctataagagaagaacctcagtcaatgtgtgaaattaactaggaacctggctcctgtttcttttaggtcatgtttttcagcttaggtaaaactagaggctttgataaagcatgacctctagaaatcattgcttttcataaatggaagtgggtttgagttttttctactgattgtagtgcaggtgatgtctacatgcccccagaacatattccatgcaacaaaaaaagcccaggtcaccgtctttgctgggaacttgacttttgtgctcactgaattttaagctttctgacagcagcctggaatcatggagggataaagtacctattagtaagatggaaaaaggtgtttcaggttggagctgcagtctgttgagagtaagctatgggaaggcctgtatacgaggggtggacttttcttctgtaagtgtccagagaccaggcctcctgaagagggcatgggggcttaacttacctggactactgtgtttacaatactcatttatcttgaactcctcctaacccctgagaattgctacatttagtatttgctgagtacttcctagcatcctagggaatcaatagaacattctcccaaccaggctgggtgcggtggctcatgtctgtaatcccagcactttgggaggccaaggtaggcagatcccttgaggccaggagtgcaagactagcctggctgacatggtgaaaccccgtctttactaaaaatacaaaagttagccaggcatggtggtacacacctgtaatcccagctacatgggaggagtaggaggcaggagaattgcttgaacctgggaggtggaggttgctgtgagccgagatcatgccactgcactccagcctgggcgacagagtgagtgagactctgttt

SEQ ID NO: 18900 - protein, 165 aa, Homo sapiens
MVFPSSSLSGVKGWQRQCSVQFLTQAGPGYRSSALCVTARQLTQCRGSDRVRGSLLTPSVSRTLAFSWTCCSSEPFCHCHHLVRNSGRICTQSCAQAVEPTLAQRYCHMTRHCHHWASWVAQCRLDGPGGCLCHASASDGSPVSPLPALPCPQQLPGDSQWPGCF

SEQ ID NO: 18901 - DNA, 5898 bp, Homo sapiens
  CDS (189)..(5621)
ttgatgcattttggctgcagcggcagctcagtcgtttctatgatgatgccatcgtgtcgcagaagaaggcagatgaagtattggagattttgaagacggccagtgatgatcgggaatgtgaaaatcagctggttctgctgcttggtttcaacacctttgatttcattaaagtgttgcggcagcacaggatgatgattttatactgtaccttgctggccagtgcacaaagtgaagctgaaaaggaaaggattatgggaaagatggaagctgacccagagctatccaagttcctctaccagcttcatgaaaccgagaaggaggatctgatccgagaggaaaggtcccggagagagcgagtgcgtcagtctcgaatggacacagatctggaaaccatggatctcgaccagggtggagaggcactggctccacggcaggttctggacttggaggacctggtttttacccaagggagccactttatggccaataaacgctgtcagcttcctgatggatccttccgtcgccagcgtaagggctatgaagaggtgcatgtgcctgctctgaagcccaagccctttggctcagaagaacaactgcttccagtggaaaagctgccaaagtatgcccaggctgggtttgagggcttcaaaacactgaatcggatccagagtaagctctaccgtgctgcccttgagacggatgagaatctgctgctgtgtgctcctactggtgctgggaagaccaacgtggccctgatgtgcatgctccgagagattgggaaacacataaacatggacggcaccatcaatgtggatgacttcaagattatctacattgcccccatgcgctccttggtgcaggagatggtgggcagctttggaaagcgcctggccacttatggcatcactgttgctgaactgactggggaccaccagctgtgcaaagaagagatcagtgccactcagatcatcgtctgcacccccgagaagtgggacatcatcacccgcaagggtggtgagcgcacctacacccagctggtgcggctcatcattctggatgagattcatcttctccacgatgacagaggtcctgtcttagaagctttagtggccagggccatccgaaacattgagatgacccaagaggatgtccgactcattggtctcagtgccaccctacccaactatgaagatgtagccacctttctacgtgttgaccctgccaagggtctcttttactttgacaacagcttccgtccagtgcctctggaacagacatatgtgggtatcacagagaaaaaagctatcaagcgtttccagatcatgaatgaaatcgtctatgaaaaaatcatggaacatgctggaaaaaatcaggtgctggtgtttgtccactcccggaaggagactggaaagacagccagggccatccgggacatgtgcctagaaaaggacactctgggtctgtttctgagggagggctcagcctccacagaagtcctgcgaacagaagctgagcagtgcaagaacctagagctgaaggatcttctgccttatggctttgctattcatcacgcaggcatgaccagggttgaccgaacactcgtggaggatctttttgctgataaacatattcaggttttagtttccacagcaactctagcttggggtgtgaatctccctgcacatacagtcatcatcaaaggcacccaggtgtacagtccagagaaggggcattggacagaactgggagcgctggacattctgcagatgctgggacgtgccggaagaccccagtatgacaccaagggtgaaggcatactcatcacatctcatggggagctacagtactacctgtccctcctcaatcaacaacttcctattgaaagccagatggtttcaaagcttcctgacatgctcaatgcagaaatcgtgctaggaaatgtccagaatgccaaggatgcggtgaactggctgggctatgcctacctctatatccgaatgctgcgatccccaaccctctatggcatctctcatgatgacctcaagggagatcccctgctggaccagcgccgactagatctggttcatacagctgccctgatgctggacaagaacaatctggtcaagtacgacaagaagacgggcaacttccaggtgacagaactgggccgtatagccagccactactacatcaccaatgatacagtgcagacttacaaccagctgctgaagcccaccctgagtgagattgagcttttcagggtcttctcattgtcctctgagttcaagaacatcacagtgagagaggaggagaagctggagctgcagaagttgctggagagggtgcctatccctgtaaaggagagcattgaggaacccagtgctaagatcaacgttcttctgcaagccttcatctcacagctgaaattggagggctttgcactgatggctgacatggtgtatgtcacacagtcggctggccggttgatgcgagcgatatttgaaattgtcctgaaccgaggttgggcacagcttacagacaagaccctgaacctctgcaagatgatcgacaaacgcatgtggcagtccatgtgtcctctgcgccagttccggaaactccctgaggaagtagtgaagaagattgagaagaagaatttcccctttgagcgtctgtacgacctgaatcataatgagattggggagcttatccgcatgccaaagatggggaagaccatccacaaatatgtccatctgtttcccaagctggagttgtcagtgcacctgcagcctatcacacgctccaccctgaaggtggagctgaccatcacgccagacttccagtgggatgaaaaggtgcatggttcatccgaggctttttggattctggtggaggatgtggacagcgaggtgattctgcaccatgagtattttctcctcaaggccaagtacgcccaggacgagcacctcattacattcttcgtgcctgtctttgaaccgctgccccctcagtacttcatccgagtggtgtctgaccgctggctctcttgtgagacccagctgcctgtctccttccggcacctgatcttgccggagaagtacccccctccaaccgaacttttggacctgcagcccttgcccgtgtctgctctgagaaacagtgcctttgagagtctttaccgagataaatttcctttcttcaatcccatccagacccaggtgtttaacactgtatacaacagtgacgacaacgtgtttgtgggggcccccacgggcagcgggaagactatttgtgcagagtttgccatcctgcgaatgctgctgcagagctcggaggggcgctgtgtgtacatcacccccatggaggccctggcagagcaggtatacatggactggtacgagaagttccaggacaggctcaacaagaaggtggtactcctgacaggcgagaccagcacagacctgaagctgctgggcaaagggaacattatcatcagcacccctgagaagtgggacatactttcccggcgatggaagcagcgcaagaacgtgcagaacatcaacctcttcgtggtggatgaggtccaccttatcgggggcgagaatgggcctgtcttagaagtgatctgctcccgaatgcgcaacatctcctcccagattgagcggcccattcgcattgtggcactcagctcttcgctctccaatgccaaggatgtggcccactggctgggctgcagtgccacctccaccttcaacttccatcccaatgtgcgtcccgtccccttggagctgcacatccagggcttcaacatcagccatacacaaacccgcctgctctccatggccaagcctgtgtaccatgctatcaccaagcactcgcccaagaagcctgtcattgtctttgtgccgtctcgcaagcagacccgtctcactgccattgacatcctcaccacctgtgcagcagacatccaacggcagaggttcttgcactgcaccgagaaggatctgattccgtacctggagaagctaagtgacagcacgctcaaggaaacgctgctaaatggggtgggctacctgcatgaggggctcagccccatggagcgacgcctggtggagcagctcttcagctcaggggctatccaggtggtggtggcttctcggagtctctgctggggcatgaacgtggctgcccacctggtaatcatcatggatacccagtactacaatggcaagatccacgcctatgtggattaccccatctatgacgtgcttcagatggtgggccacgccaaccgccctttgcaggacgatgaggggcgctgtgtcatcatgtgtcagggctccaagaaggatttcttcaagaagttcttatatgagccattgccagtagaatctcacctggaccactgtatgcatgaccacttcaatgctgagatcgtcaccaagaccattgagaacaagcaggatgctgtggactacctcacctggacctttctgtaccgccgcatgacacagaaccccaattactacaacctgcagggcatctcccatcgtcacttgtcggaccacttgtcagagctggtggagcagaccctgagtgacctggagcagtccaagtgcatcagcatcgaggacgagatggacgtggcgcctctgaacctaggcatgatcgccgcctactattacatcaactacaccaccattgagctcttcagcatgtccctcaatgccaagaccaaggtgcgagggcttatcgagatcatctccaatgcagcagagtatgagaacattcccatccggcaccatgaagacaatctcctgaggcagttggctcagaaggtcccccacaagctgaataaccctaagttcaatgatccgcacgtcaagaccaacctgctcctgcaggctcacttgtctcgcatgcagctgagtgctgagttgcagtcagatacggaggaaatccttagtaaggcaatccggctcatccaggcctgcgtggatgtcctttccagcaatgggtggctcagccctgctctggcagctatggaactggcccagatggtcacccaagccatgtggtccaaggactcatacctgaagcagctgccacacttcacctctgagcatatcaaacgttgcacagacaagggagtggagagtgttttcgacatcatggagatggaggatgaagaacggaacgcgttgcttcagctgactgacagccagattgcagatgtggctcgcttttgtaaccgctaccctaatatcgaactatcttatgaggtggtagataaggacagcatccgcagaggcgggccagttgtggtgctggtgcagctggagcgagaggaggaagtcacaggccctgtcattgcgcctctcttcccgcagaaacgtgaagagggctggtgggtggtgattggagatgccaagtccaatagcctcatctccatcaagaggctgaccttgcagcagaaggccaaggtgaagttggactttgtggccccagccactggtgcccacaactacactctgtacttcatgagtgacgcttacatgggatgtgaccaggagtacaaattcagcgtggatgtgaaagaagctgagacagacagtgattcagattgagtcctgaggcatttacttttgggtaaaggagagttgagcctgaattaggaatgtgtacattgtaggaatcctggttgtggggaccaagtctgtgggcctcaggtctggccagccagggctggtgctgtccccgcctacctccacttcctttcccttgctcactctggatccagtgacagcaggtgtcatgggtcaagcataaatcatatatagcattttcaggcatgttcctggtagttcttttgagtctgacattctaataaataatttgtag

SEQ ID NO: 18902 - protein, 1811 aa, Homo sapiens
MMILYCTLLASAQSEAEKERIMGKMEADPELSKFLYQLHETEKEDLIREERSRRERVRQSRMDTDLETMDLDQGGEALAPRQVLDLEDLVFTQGSHFMANKRCQLPDGSFRRQRKGYEEVHVPALKPKPFGSEEQLLPVEKLPKYAQAGFEGFKTLNRIQSKLYRAALETDENLLLCAPTGAGKTNVALMCMLREIGKHINMDGTINVDDFKIIYIAPMRSLVQEMVGSFGKRLATYGITVAELTGDHQLCKEEISATQIIVCTPEKWDIITRKGGERTYTQLVRLIILDEIHLLHDDRGPVLEALVARAIRNIEMTQEDVRLIGLSATLPNYEDVATFLRVDPAKGLFYFDNSFRPVPLEQTYVGITEKKAIKRFQIMNEIVYEKIMEHAGKNQVLVFVHSRKETGKTARAIRDMCLEKDTLGLFLREGSASTEVLRTEAEQCKNLELKDLLPYGFAIHHAGMTRVDRTLVEDLFADKHIQVLVSTATLAWGVNLPAHTVIIKGTQVYSPEKGHWTELGALDILQMLGRAGRPQYDTKGEGILITSHGELQYYLSLLNQQLPIESQMVSKLPDMLNAEIVLGNVQNAKDAVNWLGYAYLYIRMLRSPTLYGISHDDLKGDPLLDQRRLDLVHTAALMLDKNNLVKYDKKTGNFQVTELGRIASHYYITNDTVQTYNQLLKPTLSEIELFRVFSLSSEFKNITVREEEKLELQKLLERVPIPVKESIEEPSAKINVLLQAFISQLKLEGFALMADMVYVTQSAGRLMRAIFEIVLNRGWAQLTDKTLNLCKMIDKRMWQSMCPLRQFRKLPEEVVKKIEKKNFPFERLYDLNHNEIGELIRMPKMGKTIHKYVHLFPKLELSVHLQPITRSTLKVELTITPDFQWDEKVHGSSEAFWILVEDVDSEVILHHEYFLLKAKYAQDEHLITFFVPVFEPLPPQYFIRVVSDRWLSCETQLPVSFRHLILPEKYPPPTELLDLQPLPVSALRNSAFESLYRDKFPFFNPIQTQVFNTVYNSDDNVFVGAPTGSGKTICAEFAILRMLLQSSEGRCVYITPMEALAEQVYMDWYEKFQDRLNKKVVLLTGETSTDLKLLGKGNIIISTPEKWDILSRRWKQRKNVQNINLFVVDEVHLIGGENGPVLEVICSRMRNISSQIERPIRIVALSSSLSNAKDVAHWLGCSATSTFNFHPNVRPVPLELHIQGFNISHTQTRLLSMAKPVYHAITKHSPKKPVIVFVPSRKQTRLTAIDILTTCAADIQRQRFLHCTEKDLIPYLEKLSDSTLKETLLNGVGYLHEGLSPMERRLVEQLFSSGAIQVVVASRSLCWGMNVAAHLVIIMDTQYYNGKIHAYVDYPIYDVLQMVGHANRPLQDDEGRCVIMCQGSKKDFFKKFLYEPLPVESHLDHCMHDHFNAEIVTKTIENKQDAVDYLTWTFLYRRMTQNPNYYNLQGISHRHLSDHLSELVEQTLSDLEQSKCISIEDEMDVAPLNLGMIAAYYYINYTTIELFSMSLNAKTKVRGLIEIISNAAEYENIPIRHHEDNLLRQLAQKVPHKLNNPKFNDPHVKTNLLLQAHLSRMQLSAELQSDTEEILSKAIRLIQACVDVLSSNGWLSPALAAMELAQMVTQAMWSKDSYLKQLPHFTSEHIKRCTDKGVESVFDIMEMEDEERNALLQLTDSQIADVARFCNRYPNIELSYEVVDKDSIRRGGPVVVLVQLEREEEVTGPVIAPLFPQKREEGWWVVIGDAKSNSLISIKRLTLQQKAKVKLDFVAPATGAHNYTLYFMSDAYMGCDQEYKFSVDVKEAETDSDSD

SEQ ID NO: 18903 - DNA, 6210 bp, Homo sapiens
ctaaggaagttgggctcggtcccagtgtcaagtgtccatattttctttattttcttttagaaactaaagggaagggaatgaaccatttcagagcatcaaccgaaacaagttaaaagaattgatctttgcttagaagaataactagttgtttcaagtctcatatgctacatactgtgtctttttgaataccaggttatacctcagctcattgcaagaattgatacgcccagacccttggtgggacgtctcattcaccagcttctcacagacattggtcggtaccacccccaggtatgtggagactctgggcagtttctcatctaaccactggtttggtggtcagcctttccaaaagctgccctggcgacacaagcgcaggaactgggagccatgtgttccatcctggcccaggagggtctgtccagccagccgtcccagagggcccgggagccttgctaaaaagaaagcgttccctcgaagactgagccccttcctggtagtctcaagcagatgttaatgtcacactcaccacttgttttgttattctccttaaaattcataccagctcttccccaacccacatttcctttatagatgtttcttctgtttttccctcaggccctcatctacccactgacagtggcttctaagtctaccacgacagcccggcacaatgcagccaacaagattctgaagaacatgtgtgagcacagcaacaccctggtccagcaggccatgatggtgggtcggagccactgtggggcttcatagaccctggtcccttagctggtgggcgcaagtgggattgtttttcttcctcgcattggtgctgtgcacttcctctgactgctggaaatagtacctcctgtgtctccaaaacagacctttctgaggttagctgattcttggtgcttctctccttcttctcttggcttcaggtgagcgaggagctgatccgagtggccatcctctggcatgagatgtggcatgaaggcctggaagaggcatctcgtttgtactttggggaaaggaacgtgaaaggcatgtttgaggtgctggagcccttgcatgctatgatggaacggggcccccagactctgaaggaaacatcctttaatcaggtatggggtaaaaaaacacgaaaggacataaccctgtagaaatattctgccactaaaaaaaaatgaaatgagaaaagtttttatagaatgaaaggacgtgacccaaggcctttgtcagatttcttttcctctggcctttccactgactttaataaaacgagctctgatggaggtcacagagcataaaacatcagaaattagttacagggacccttctgaattttaactggaaaagcccaagatttctcaagaggtcatctcgtctctcctctcacccttccttccctataagccatgctgctggtttggaagctccagggttggaggcctgcacctatgctcttgctttctccagccccctgccagtgttttcaggccacagcgggctcctgaggaatatctgcagtcagcctggggattttgcctcctgggttggttgagactttgataacttgaaaacgtgcctgctttctctctcaggcctatggtcgagatttaatggaggcccaagagtggtgcaggaagtacatgaaatcagggaatgtcaaggacctcacccaagcctgggacctctattatcatgtgttccgacgaatctcaaagcagctgcctcaggtaggatcttcaggctcctggcagggttaactgtcattatagtcctttctgttttactgtctatgaatgttctaacactcattccaaagcatctggttttacttctgctttgggacaagtaattgttattagcaatccactgaaaaatacttaaattgcgtttaaattcttccctggaggcagaacactaaatcctttggtaattatttacagctcacatccttagagctgcaatatgtttccccaaaacttctgatgtgccgggaccttgaattggctgtgccaggaacatatgaccccaaccagccaatcattcgcattcagtccatagcaccgtctttgcaagtcatcacatccaagcagaggccccggaaattgacacttatgggtaaggaccattgtgcacttctgtcacccacttctccctcctacactggctgagaccccttccctcttctgaaattactgcttgccattcccactactcacctatcatagctacatctctcccatgctcattgagaggaaaatagagggcaagcaaatttctcattatgtcctcaggacttagttcattcatgtagttgggcttatgtgaagcatgatcacacataaagggaatgacaaaggcatgcaaggcagagaagtaacagtggaaggcaggtgttggagactgatgaggccagggaggaggcagctgggtgcaagcagggaaggtgctagctcctctgaaatgggggcttctggctcttgaaatttttttctttttttttttaccatcatagtctctgtggtaaatgattgtgtaaaatgaacaagtggattctcacagtgagatttgttaagcaagtgggctctggaatttcccttggggtagagtgttacttatgggggatgttttagtgaggcctgagtgctgtggtggcactttgaggcctctcgctttttttttttttttttgagccagagttttgctcttgttgcccaggctggagtataatggcgcaatcttggctcactgcaacctccacctcccaggttcaagcaattctcctgtctcagcctcccgcgtagctgggattacaggcacgcaccaccacacctagctaatttttgtatttttaatagagttggggtttcaccatgttggccaggctggtctcgaactctgacctcaagtgatcagcctgtctcagccttccaaagtgctgggattacaggtgtgaaccactgcgcccagccacctcttgctctttttttttttttttccccaagacagagtctcactctgttgcccaggctggagtgaggtggtgtgttctcggctcactgcatccccacctcctgagttcaagcgattctcgtgcctcagcctccctaatagctgagattacaggcgcatgccacacaatcagctaatttttatatttttagtagagatgggatttcaccacgttggccaggctggtctcaaactcccgacctgaggtgatccgcccagcttggcctcccacaatgttaggattacaggtgtgagccaccgcgcccagcctcacctctcgctcttaataatgctcaatgtttcttaaatgcagtgattattcaccaacaccaattaatcatggtccacaggtgattatctctgcatgagctgttgtcttctgatacaaaatgtgggtcaggctggttcttggggtgtttaattaaagagagtttaaggaaggaattgtttccagaggtgtaagcaaagctaagagaatcaacaaggagcgctcatgaacaagcacaagtgagaaattgttactcagccctcacccacccccacactccagaactgaaagagcaaggagcccagctagaaccgtcaccatgccagagaggccatctagcagagtctacagtccagagagagtggtagcttctagaactggggccaggctggtgatgggggacacataccctgacctctccctctacccatcctctgacctcctgccagtacccttccaccattggccacgcccaagtgggatcccaggtgatgcggcttgtaggagtcaggcttctcagaacagaggaggacagagtgggtcggaaaacaggaatgatcatttccatgcctaaccgttcctggtcctcaaaaacagattttgttttgttttaatttgaacaacactggtcattgagaaccataaaaggcaaagccactcttttcattaattctaaagattgttttttctttttgtgaggaacgtgtgattaggtaaggcatatgtagtctgtgggatctcttgaatgcagtggtgctctcagctgaagagctgaggacctctgatgtacactcaccgctcccactgttccttacaggcagcaacggacatgagtttgttttccttctaaaaggccaagaagatctgcgccaggatgagcgtgtgatgcagctcttcggcctggttaacacccttctggccaatgacccaacatctcttcggaaaaacctcaggtattcagaaaccctgaaatggcaacaatttgagaagtcttctggttttttcctacatttgtctcgtgtagtcatgtattatatcttaacaaaaaactataaaattagggagccaggcatggtaactcatgcctgtagtcccagaaactccagaggttgaggcagggggatggcttgagcccaggagttcaaggctgcagtgagctgtgattgtgccactgccctccagcctgggtaatagagcaagactgtctctttagaagaaaaaggctgggcatggtggctcgcacctataatcctaatattttgtaatgccaaggtaggaggatcacttgagcccaggaattcaagaccagcctaaacaacatagagagaccccatcactatttatttaaaaaaattaaaaaggtgaccgggcacggtggcccatgcctataatcccagcactttgggaggcccaggcaggtggatcacttgaggtcaggagttcgagaccagcctggccaacatggtgaaaccctgtgtctactaaaaatacaaaaattagctgggcgtggtggcggccacctgtaatcccggctactcaggaggctgaggcacgagaattgcttgaacctgggaggcggaggttgcagtgagccaagattgcaccattgtactccaggctgggcaacaagagtgaaactccatctcaaaaataaataactaaagtaaggaaaaaaaaaattaagtggccaggcatggtggctcacatgtaatcccgacactttggaaggctacagcaggaggattgcttgagaccaggagttcaagaccatcctggacaaaaaagtgagaccctgtctctacaaaaaataaaaaaatcagctgggcatggtggctcatgcctgttgtcccagctccttgggagatggaggcagaagaatcatcttagcccagttggttgaggctgcagtgagacaaggttgtgcctctacactctagcctgggcagcagagcaagaccctttctctcaaaaaataaagataggctgggcacagtgactcacgcctgtaatccctgtctctacaaaaaaaaaaaaaaaaaaagctgggcacagtgtagtcccagctactcagggggctgaggcaggagaatcacttgagcccaggaggtcgaggctacagtgagctgtgatggggcaactgtgctcgagcctaggtaacagcgagaccctatctcaaaaagtaaataatattttttaaatgttttaaaaatgaaaaattaagttataaaattttataatttataaccaagttcttccagagtttttagggtattttcattgggaaatgcctttaacaacctccaaagaatccagcagggagcaatttgtggcgggtagactggagagtctacagatgggatgggtctgaccccttgtgggatgaaagccaaacctttcccatcgtccgtattctggcactcctcttcctgttaaaaccatgagaattcacttgagaggtattttagtcacttgattgttcccccaaagccatgagtttcttgggcaggttgaggagacctgtgttgctttcactgcaccatcagtgcactgtctttctgtgatgccttattcttcacaaagcatccctcaacacacacttcacaccagcctgctgcggcgggggctcattaaaaatagtcagggccgccgggcgcggtggctcacgcctgtaatcccagcactttgggaggccaaggagggtggatcacgaggtcaggagttcgagaccagtctggccaacatagtgaaaccccgtctctactaaaaatacaaaaaattagccgggtgtggtgttgtgcatctgtaatcccagctactcgggaggctgacgcaggagaatcgcttgaacccaggaggcagaggttgcagtgaaccaaaatagtgacactgcattccagcctgggcaacagaacaagactccatct

SEQ ID NO: 18904 - DNA, 4618 bp, Homo sapiens
tttgctttatttttttccttttctcttttttttttttttttctctttcctttttttaaatttaaaccattgagacttcagaagagcaggacacaatgctgtggacaggcaccaatttctttaaagaaattcaatgtgggcaaggcatatgtgtaaatttcacttttactttttataaggggttagggagctatttttggttttgtccttcactttccctctgtcttccttctttatacttttctcagttctacttatgacacctcacttccctagagaaggcctgcctccccatagggaatctgggggtttcttctggaacggggcgtgaggacacaaggaggcctctgggccacgcctccctaccagatgcaggaactcctggactccttggtgggctggccctggctagcccttgggcctcggagatgatcagaggtgaagaaccgcctggaagaggaaggccagggtttggccaggagaactaagaaggtctcaactccaggctttgttgtgtttaagctattgggagccccaggccacaccaggacttgcagtggtgggaatccattcctcttctgccctgtgttgcagggaactaggaggtaagggtggagggcgaccatctcgctcttgctggcggtggagcagccatccctgccttctgttgggaaaaactgttgtgccaaactcttgtgtggaacacagctgggtcttcagcaggcatctgtcactgccgtgaggtcagcgcttctcacctaactgcctcctggattgtcatcttcccagatgtgtcccatagtgtccaggtgtcacagagacggcctgaggccctaagatctggttgtgactttgccatgataacagggtgtcctgaactggctgccgttgtcgtgttctcacagtgaagggcgtgccctgtgtgccggggtccatggtgtcatatgcagtgacacacactgtcaagcgccatttctctcacccctggagacttactgttaggtgcctgccctcagtatagacgtatccaatgggaaaacagcggacctgcccagagcagggaggtgtcgtggaactgggtagaccccctgcagcgttaggggcccatttgtgggctcgccaccttcaggcttccccagccatgacacttcagccccgccacccatgcctgtctgctgcagccatccttgcactctccagcgacactctcgcacctccctaggggaagcttccctccccctgggctgctgctctgagcccgtctgttctccccctgcaagaaggggcaatgctcttgtgttgtccctctgtctggacgcgcctggccactccgaaggcttttcaccccattatggccaaatagtatagggccactggggagggggaagggaatcattttgtgttcatttttgttttctgtttcacctaaaccagcataggattgataggggagacggttggcgggcatttccgtttctatgtgactatgtaaccaaggcagcaggggcttttacctgctaggcggcagtcctttggccctgagaatttgggagagaacagtgcatcaggccaggctcagcaatatgtttgctcacattctttcagccttctctcacccccctcaacaccaaactttcttccttgtgagcagaaggttggctgctgttagcaggatcccacagtgataaccaggcccttcccttcctaagccaaaacccattgtgactgcctgtctctcctgtctctgacttctcaggcagcctcctgagtgcactgagttgtatccgagagggtgggaacagcagcatcccctaattgcagtacacggttccttttccgcccgccaccctgcctttccttgggggcagctgtctctctgtacatgagcaaatgggcaaaaacagtccccaaacccagcacccccctctccctggctgcagcccacactgtaacatccctagtgaggctccagcctaatgagccccttattttctttttcttccctccccaggtctcgtagctctaactaaaaagttcttggagccatcgtgctccccctttgttatttttcttgctatcagagtagcaagaaacagcacccctgtaggtgacaggtgggcagcctggtaggggtcgccagcctccatgccccctcatcttccagttcttgcttagtggcacgacctctttccatagcataaatgcaggccagcgttttagccccaagtgcctgcccttgcttcttacccctcccctgctttctcaaacacttgcccacctcaggcactcagcgggctccgccgtggtgagagaactggccgtggctcagccccgggtagcacctgtaatttcagtgccactctccactgtccccttgtggaccagcttccactcactgtaacgtcccccctcctgcgtcttcactgggtctcaggctgccagcagctctctggtgcatcgtctcaacaccaccaagtttgtaggacctgcccaagttctagtagtattcaaaacttcaaacggcagtcatttgatctcctcggctctgtggcaaggatagccctttggagggggactcttgacctcggctgttagggatctgaacttggttttcccgtcagaagaatcagcaggacagatcgtagtgccttatttcattgtcctcccctggccaggcctcctggctcagctggaagtgcatggcttctttctccctatctgtgtcctctgtcacttgctctttcactctctctctcattcccagagagccacgggggagggatcaccctcacccccaacaccctcttcctgagggctgtagccaggtccgcatctccccaccaccaccagggcactcactcgcagctatagcccaggacagaaaaactgtgctttggacaggtgcacactctctgcctcttacctctagccaggaggatgcctcagtctgttcattcgagactggccccgtctgaaccttctctgggcactggggactaaggttgcaggccttagcctcgtctcgtcccagaggcattgggtcaggagaatgggaatttttttcctcccacctggacatagtttgcccctgtggctgcctttctgagggagtatattaaatgtttacttaagaaacaccctgtttacagccagaggagaaacacccaacactgagtggagatttgactctggacagggccgggcctccttagtggcactgccggggggccccagagcgaatgagggcagagatgcccggggcaggggcaaacgccctccgctccctctgcacccaaccctgtggtgctaggaccactccccgccttccctacggcctcctcgccctgcacattccccaccttcacaatcccctcctccaagatctcagctccttaacatatcagttgtctcatagcctagaaaaccagtgtttggagcaataagatgattatttttgcttgaatctttttctaagagaaggaaaagagctggcattgtgggaattttctttttatgctgttagctgtttaccttcttagaagacatcctaataggatggatgtctgggttttagccttggggtatcttttggaaacttagaaaagcaggagtcaggctgccaccccctaaggagggaccctaacgttctgcccttgcctggttccatttggctccttccagccctgcccaccaagtgcagctcccactttccatcctgcccatacgcccctcttcccccgacatctgggggcgctggtggcacttactctaggttggtctcagactatccctccccttggctggttttccctcctaggcctgtctggcagcccccagacggacgtagctcctgggagtctcggccctggcaaccttggaagagccaagctgacattgtttagctcttcaggccactgggttttggaggcagaagtccagagatactggctctgccaagctgtcgtactgggctgtggcacagccttcgagacaacacgggtgtatctctgatcctgccctacctaggcttcaaggggcttctgtctggagaaatgccctcaaagggtaaccagtaggtgtggcattgaattggccagtgttagcatctacagccatcaccgagatgagtttgcctgcccgagggccccctaaggttatagacggtatcagcagggaggccgtcccgctggttttctaggagagcccacaggaggaagggagcctcttcaggggcactggaatcttttgtaccaggggcttcttttcatcagagccggggagtacattgcagtgacttcttaaacatttgtgtgggacagacgagcgtgagggaggttttaagccaggcacaaagttagtttccaatactagttaataaatctatttttcttcatttcctttttttgcacagaagctggtaatctaggacctacgtgtgaacaactttatatgaatattttttgtacttggtttacttgggttggtatgatacattatatttaagttccttgaacactgtggatcccctaatgtgtatgaatgactgaggctttgtaaattaagggacgtttgtgtgaataaagttatttgatggggtcaaagaagccatatgtgatttg

SEQ ID NO: 18905 - DNA, 5008 bp, Homo sapiens
  CDS (4082)..(4474)
agtactagaactttcatgtgccctctgaaggatgtgagccatggaaccggcaaaccgcatccctgactaggggcctgtggccttgtcatttacctcccaaccaccacccctccatgcccctttatctgcttagcgcatttcttttcttcggttttgtacatgtatctgagtcctaatcccctatatgctccccttacagaggaaaaagacgggtttgcctgtgacctcctacataatcctcctgggagctcagatcaagaaggagacgatccgatggaggaggatgatttcatgtttgaactctcagacaagcctcttctcccttgctacaacctccaagtgtcagtgtcccgcgggtaagtgtccgagagatccacggtgactgagtgtcaggatcctggcactcagtaggaaggtggagttctccacgaggaagtgaagacctggcaacgagtgccatcacacatgacaaaggctagcctgcccttttagcccagagtagtcatgttcaaactagaggctgcaggctccatggacattgactatctgcatttcctgaaccttaaatctagattctctctcggaaggcttttttttggcactattactgggtataaaagataatctgagagatacttgggcctatgaactgctagaatctctggaacatttttgtagtttctgggggtaaacagatagaacattagaaattgagattgctggaaaagccaggacatatggttgccatagccatggggccactagggtccttcagtaatccacagcctagtttctcagtgcagtaatgttagtagcgtggtgctgccaacattgtcagcctagatgactgtgcatattatattggggatcacccatttatttaaggagactagaatatagaatatacctgacacgtaacattagattgaacccaatttaatacttatttgatggttctggagggagttcgacagccggcagggccatggcccttgttgggtttccccacatgtcagcgtgtggaagtgctggttgagagaaggagaatgcgggctgaactgcccttttattcttagcctccatgattttttccctctgattggtgtcttcatgtatttcaaatacttttccgaacaattgtaaggataatttttctttgatatctatttttaaaatgtcaactctatgttaaaatcctgtgaaccagtggctggtcgcagcagttgtaatttcagcactttgggaggccgaggcaggtggattgcttgaggccaggagttccagaccagcctggccaacatggtgaaacctcgtctactaaacatacagaaattaggcgggcatggtggcgggtgcctgtaatcccagttacgagggaagctgaggcaggagaatcgcctgaacctgtgaggcggaggttgcagtgagctgatattgcctgctacactccagcctgggcgacagagtgagactccgtctcaaataaaataatataataaaataagtcagtgaaccagcatgatgtgcacaggatggggagctaggtagacgatggatgaggaggtctttaagtgagagcctctgtttagggctctaaccattagaccacagtttctttgcatcccctgccctcccccccaccaccccacacgcatagcctgatcagaataaaaatagcatgtatgatggcactagtagggatcaagtttcaggggcttttggtccttattcttctgggcataagctgatccctgaggacagggcggggcctctgggatatagtattgcacggttaattaattcctccgatgtattcagcacctccctctctgaaacaggatcttgggcttcaggcagtaaaaggaccagggtagtctgcattaggtgcagacagaacacgggccacggagggctgcgtgcccctcagcgagctgagtggcaggcacgtggttagcccagagcccggtaccagcaaagctggttttcctgacgtgacatcctctagcgctcgctctagagctgcctttccccacagctgcagcacactgtgaaaatgtctgttcttcaagaagttgggggtgggggtgctagcgtagagtgatgcctctgaggccctatggggtgcagaagggccttctgaatcaccaaagcaagactgaattctcatcactagtgtgaatgttctcagggcttttttccattctttggaagtgatggtccaagtgtatgatatctgtagtccccttttcttaacccagagccctccatttcctactcatgtgagataagagcttgctgtcatttgggagaaatgttccattttagggataaggatcgtgggtctggttagatgtttaaggtgctggaacagaacatttgattctataaacatgtcttaaacagctgcaccaggtcaaaccctggggaccttcaaagaatccaccatctagtgcagtagacagacaagtatataattaactctaataaaagacaaaatgtcctaagcagatttattataaaaaactccaacagtttcagaagggtgtcaaatgcaaaaagttccagtccaccctgagcccccattgctatgctgcagagtgaaccacagtttaaggttcttttgcaaccctttcagaaatgggttttgttagtagtattacaatagggatgtgaatcaaatgccacgagaccatgggagatggaagaacaatgagttacaccgggggaaggtttcacaggtgatacagtatctacctgagctgggcctggaaggagagaaggatggagcaaggcactgaaacatacaagttcagaaagtagggggagtcctttatcatgtggctggtgcttggtagggtgggggatacaatgtggggtgtgtgtgtgtgtgagagagagacagagaaagagagagactgggtggacattgggctgaagaggttagaaggtctcatataatatcatgctagtggccaggcatggtggctcacacctgtaatcccagcgctttgggaggctgaggcgggtggatcatttgacgtcaggagtttgagaccaacctggccaacatggtgaaaccccatctctactaaaatacaaaaattagccaggcgtggtcgtgggtgcctgtaatcccagctactcaggaggctgagacaggagaattgcttgaacctgggaggtggaggttgcagtgagccgagattgcgccactgcactccagcctagagactccgtcttggaaaaagaaaaaaaagaaaagaaaactgtaatggtaacagaagatccagtgagggtgggtgggggtgcagaagagtgactcttggcaaagggaaaccggttaggaggctgacaagacagagcccaggccagaagtggcaaaggctggagctggggtagtggaatagtgaggagggaaaaccctgtgaactgggaccactaatgtggggaggcagcgtttcttcccgcattagtcaatgtaagcgtttggcccgggatcggcctctccagcacccctcccagctgtccccaggctgccacccagtcgggtgtgctcagcaaagtcagactccactttctgtaatgtgagctctggccctgcagaaacgatggtgctgctgctggagaaaaaacttgtctaatgcattccagagccaaagagaaatgccttttggattacccgcagtttaggcctttctccacggctccccctctgctggggaagatcttggagagcaaggaggccagggaagcaagagtaagaacaggagaagggaaggcagccagggttggcaggggcgggagtcggaggaaagactggtcccagcagatggcaaatgccaggtcacaggggcgcaggctaagtccccaagaagcctgctaagagttttaggttctagaatgcccctttgcctcctgtttgtgttattttggaagaggtggtcactgattgcgtgctcaccatttagctgaaagccgggccaggcattgcaggggacaggagaagacatttgcctcagctatacccaaggagcctgtggtttagcaggggatgggggagccagactggcagtgagttataatgggagacattgatggtcgtgcagcctttgtgggctttgcagagtgttctgggtcggtgcccccaccgcttcctccagcctccttcaataactcccatccttgcctttgcaggtcctgcaactggttcctcttttccgatatcttgaagaggctgaagctttcctcgaggatctttcaggcccggttcccgcactttgaaatcaccaccatgcccaaggccgagttctacaggcaggtggcctccagtcagctgctgacccctgccgagaggcctggaggcttggacgacagatcccccccaggctcctctgagactgtggagctggtgcggtacgagccagacctacttcggctcctagggtccgaggtggaattccagtcttgcaacagttgaccgggaaaacagcccctcctcttctttctccttccgagttcgcccttcccccacctccttgtctttccccgaccgagcaccagactgaagaatgaggcaataatacggaccaacaagaagccgccttatcaatgccagcattagcgactggactgtttttgtttttttggttacaattagttctcatctccctgtcgtcgtcattgttatcgtggttgctgatgggggtggaaagttgaactccatgtctgaggacaagaggtcccgggggtggtgggaggtggcgccggggtcccttggactggcctccttgttcatgaccaagaccaaacctgggccctggatggccttggcctgtcccgaggagaaatgagaaaatcccagatctctgagcgccccccaactccattcccctgtgttcttctgtcttctgtagtatttattttattagtatttaatttgtattgtttcattggtttctgataagtctgtatcactgtgacgatttgtgacaacttgttgtattgaggg

SEQ ID NO: 18906 - protein, 131 aa, Homo sapiens
MGDIDGRAAFVGFAECSGSVPPPLPPASFNNSHPCLCRSCNWFLFSDILKRLKLSSRIFQARFPHFEITTMPKAEFYRQVASSQLLTPAERPGGLDDRSPPGSSETVELVRYEPDLLRLLGSEVEFQSCNS

SEQ ID NO: 18907 - DNA, 5125 bp, Homo sapiens
  CDS (750)..(1088)
gttttgttttttcatggagtctcactctgttgtccaggttagagtgcagtggtgtgatctcagatcactgcaacctttgcctcctgggttcaagtgactctcctgtctcagctttctgagtagctgggattacaggcacctgccaccacaccctgctaattttttttgtatttttagtagagacagggttttgccatgttggtcaggctggtcttgaacttctgacctcaagtgatctgcccgccttggcctctccaagtgctggaattacaggtgtgagccaccgtgtccggcctaaaatattgttgatatgtgttttaagtctttttaagcctatgctcccccatttccttacacttggccatagtcacatccagccatttttctctggtgtcctttggtctgggttgtgcctgttgtccctctgcctctgtgtttcctgcacgtgggcagttagatcctgagatgggatcaggctccactcagctgctgtggaagaataaaggggattcggatgtctgtcctctcatgctcctcgaagctgatgatgcttgatgccattcttggccttttttgcttttattttttgtagttcttaaggggtttaaaaaatcgtggcataaggtaatgcaaaaaggtgtccatgtgttaaacgtacaactagacggactctgcagtgtgcccacctgtcctgctgctggaggccatttgaggagccagctgcctctcacagctatggactgcagcctatgcatgcctatttcctagtgacctggtgtgaacatggtggagtggggggacaagctcctgatgctcctttcctgtctctgcagcttgtgtttgaccaccagccaggtgacatctttggctgtgtggccgacatcggttggattacaggacacagctacgtggtgtatgggcctctctgcaatggtgccaccagcgtcctttttgagagcaccccagtttatcccaatgctggtaaggatggtgaaccctgtatgggaccccatgctggtgtcaggggagagagcctgaggctcgaggcttgtggagaggttcatggaagggggacgcctgggttctggtgagggtgtggctctccaggtcctgctgtcgaaatgcccggtggggccaggccccaggtcttcagaaagatctgacaggcagcagcagggagtctgacttggtgctggaggacatctcaaggcccctgctcctgcactcctgccctctgacttaaactgccggcctcaggccatcgctttggcatccttctcacctctaggctgcttgcccagatccagccctttctcaaagccagggccagctgcccgccacttctgtgtccccagccctgcccctgagccttcagggctgtccctcaaaccatgttaggcatggcctagaaccatctccattaaattgagatcactttgaagacaaggtgatgactggctcccttgggcatcgtcctcccacacagcacagtgtcttcaaatattttctttaatgtaagcagatcatggtggctctgcccaaaggctgctgctccagtgttccatggcactgacaactgtgcatggactgtgttatcacctcccagtgctccatccctgcctttgggggctgggtgtgctcaaggaagaagttgtaggggcaagaccagggattaagggccatggcccaggtgctgtctcaggccaccacttcagcccttagaagctcagtgttccatgtggaggggatggtgtgggtagtgggtttacaggaaccaggggtgtgcatgccgggcacatggccctgctccctgggacacacgcagtggcagctgtactgtcaccaggggaagcaccagtcaccactttagagcccatgtgagtgtgatcgagtgaaagctctgtgttaatgctccatgggttattaaatccacgtagtatcaccttgaattaggccatcaccctaagcctggtgaagactgttcctgaatgtgccgcccacggatctggggagtgcttggaggagagcggccattggggacctgtcccatggggcttctttccatctttcactggcgggggtggggggttggggggatccctttcatatggacatatgcgcgtctgcacatgcccagcactcaggaagtcttggctgatctctgagtttaaagtaaaccatgtcagctctcctgctgacagtgaatttcggcctttctgtaggtcggtactgggagacagtagagaggttgaagatcaatcagttctatggcgccccaacggctgtccggctgttgctgaaatacggtgatgcctgggtgaagaagtatgatcgctcctccctgcggaccctggggtcaggtgagcggcctgccctgcagcaggagaggttgtgcttgccctagaccctcagagccaatacgggcttcagcaggacttcagtcatgaagctgcccggctttgtatgtgtgaattcacgcaatgccagaccggatctggtagaaagcaccagcacctcttcccacctgtaagctcctccccagagctggcagcagttacctgtctggggaacaacgttccagacattttctgtgccgttgtttctgtgcccaatttctgtagcttaatcttcattaggaatacttacccactcaataagttaagggtcaggtcagttctttagtggctgcatgggatttaactgtataacttagctgggtgtggtggcaaaggctgaggtgggaggattgcttgagcccaggagtttcaggctgcagtgaactaggattgcaccactgcgctccagcctggtgacagagtgagactcagtcgtctaaataatagtaataatagtataactacagtttgctaaacactgccccatagttggaccttttgattgtctccaagtctgtggagtggataccatcctgcacttttgccctgctgttactgtagacatttccaggcagacagttcaaagcttaggcctattggtaatgttgatggatattgccaaatcacatggaaacattttggaaatgtgatggtggcatggtttcgacagtatcagcagtgtctgtctttcgggctggtgctgggagggactgggtgctggtgactgctgttctctctcctgtccctgccacatttcatgtctgccttgacgtgtggtcacgcgtggtcagccacctgcttggtggcttttcactggggaagcatgcagggcagtgaccatggaagagtgtcccattctgccacatacatccttgggaagggagcatgtacctcccagtgaacatgtgattccactactactgggtgaccatgaggccatgcgggcatccgggccacaggctgagaggcacagcagctggggctgtgccctgcagagctcaccacttgttcccaaatgtgagatggggatgagacctacctacagggtggcgaggatgccacagagggtcagatgtgagccttagtataatgttcagcatggagatgattaatggagagagctcctgaggaatagcaggcatccaatgactcctcctcctcttttcccttattttccccattaacagtaaaaaccttctgtttctcaaccagctttctagattaaaaagcaggaggagtttgaatactattaataagagcaaatatgtattaaatgcctttatcttcacatcagtcctttgagcaaacagcagatgttgtttcacattacagagaaggaagaggaggcacagagaggtcagagaaccggcctgaggtcactcagcaagtagggcagcctgtgttgaacgcagcacttggttctagagtctgtaaaactcactctgccccccacctgattgatgggctctgtgcccccaccctgtaccctcaacaggtcccttgccatactgtcccctccacctctcagaaagagtatggggttcctttctagatggtgaatcttagtttgctttgtgctgctgtaatagaataccctgaaactgggtgatttataatgaactcagcgtgagatttggaggggacaaacattcaaaccataataagtggtgagtttgggtggtctctcttggcatgctggagctgggcttgagaggcccgtgtgattctgactgcctgggccatgtagtgcttgtggactgggaacaaacagcggggtggccagggccatagaaactcgcccagatcctctaggtgttgtcagcagggccacctgagtgggccctaggcattaggtggggacagggctgaagggcaagatttggttttccagatacactcatgggatttgtctcctgaaggaaggttcacggggtccaatgacaaggggtaccgccctaagtgcatttcaggaaggggtgtgctctggcagctgcattagagtgggatgtgtatcccagcagcctctgcctcacctaggggtccccacagacttggaacacctctgagccagggggccagcccccagcagaggctcagctgggttttgtgtatttagctggttgataggcacattcctattcctgttgcataaccggttctagccgcagagccctgcgggaggccaggtgctaatcacacacctcgctgttctgttctcggtatacagtgttggcaggcagcgtggcgtcttgtgatgtcttgcacctggggctcccagcacctcggagcagtgctgggagtcagtgtgttccacaccttggccagggccagcgctgtgctggcacacctgtcggtgcaattccacagcccagacccattccaggcagctgggatcagccctcatgacatttaatccgttgagtcgtcagaatcccactcactcaagacattccccctagatttgtatttctcaaagcttttttaaactttcaatttcataagtaatacatggatacactcttgtgaaaagaagaaattggagcattgtacttaaagctgatgtccttaggagctgggcgtggtggtacgtgcctgtagtccctcggctacttgggaggctgagatgggaggatccttgagccccagaagtcgaggttgcagtgagccatgatcatgccactgcactccagtccaggcaacagagcaagatccttgtctctctctctctc

SEQ ID NO: 18908 - protein, 113 aa, Homo sapiens
MHAYFLVTWCEHGGVGGQAPDAPFLSLQLVFDHQPGDIFGCVADIGWITGHSYVVYGPLCNGATSVLFESTPVYPNAGKDGEPCMGPHAGVRGESLRLEACGEVHGRGTPGFW

SEQ ID NO: 18909 - DNA, 4674 bp, Homo sapiens
  CDS (608)..(1270)
ggttggctcttgcacttcctggctctctggacttggttatgtgattgagcctccatggcctccgtgtctttgtctgtcaatgggtttgattaaagcgttgacctcataggttcttaggaggattaatgagaacattttatgtaaagctgcttacatggagccttggtatgtgccggaaagctttagccctttattaaaagtgacagcagacccagcacggtggctcatgcctgtaatcccagcactttgggaggctgaggcgggcagatcacttggggtcaggagttcgagaccagctactcgggaggcagaggcaggagaatcgcttgaacctggggtgcagaggttgcagtaagctgagctcgcaccactgcactccagcctgagtgacagagtgaaactcagtctcaaaaaaaaaaaaaaaaaaagagtggcagtagtggtgggggagacccccatcccccttgctggggtttcctaggaaagaaggctggtgagagctgttgctggtggtgggccctgagccgcagggtctgagggcctaccctgtgctaccccagagctgcctgagaactggacagacacgcgggagacgctgctggaggggatgctgttcagcctcaagtacctgggcatgacgctagtggagcagcccaagggtgaggagctgtcggccgccgccatcaagaggatcgtggctacagctaaggccagtgggaagaagctgcagaaggtgactctgaaggtgtcgccacggggaattatcctgacagacaacctcaccaaccagctcattgagaacgtgtccatatacaggatctcctattgcacagcagacaagatgcacgacaaggtgtttgcatacatcgcccagagccagcacaaccagagcctcgagtgccacgccttcctctgcaccaagcggaagatggcacaggctgttaccctcaccgtagcccaggccttcaaagtcgcctttgagttttggcaggtgtccaaggaagagaaagagaagagggacaaagccagccaagagggaggggacgtcctgggggcccgccaagactgcaccccccccttgaagagcttggtcgccactgggaacctgctggacttagaggagacggctaaggccccgctgtccacggtcagcgccaacaccaccaacatggacgaggtgccgcggccacaagccttgagtggcagcagtgttgtctgggtgagtggttgtgtggccagcagatcggtgatcctcagcctgacctctgggtgagcctggggctgctccagggaccaggctctgggacccgtgacttgtgggcctctgggaggaccagacccagcccggtagtgcccaggcgcaggataggggatgaacaatgtcccttttgaacctgaggctgcatccccaacaggcttggctcccagcacagctgtctcctcacaatgcttggcctcttggcctgagcgtccacggctctgcccaccacaagaccagccaaaggcgcccttgttcttggtgtggcagagctcgctcctaccacccctccccctcagccgcctgaatgaggacccagagacttgggcagtcaccagcttggtccctgactccctcagggactcagggcaagccccctgacctctctgtctcagctttttcatctcagtaagggtgatgacctctgccaacggaatctccccgaggaacctgaaatttaattttaatttttcatttggaaataatttcagactgtgttacaaaattagtacagagaattcctgttcacccgtcatccagattccccaattgttaacatcttgcatgaccacattacactggtcagaatcaggaaacaaacacgatactgtgctgttatataatctatagaacttacacatttctccaggtgccccttcagtgtcctgtttctggcccaggatccattgcagaatcacatgttaacttgtcgtctctttaatttttaaaaatctgggtactgggggctcccctggtgtccctcgagcctgttctctgctgtttgggaaccacccttgccacttgcccatcctcaccagaacgccatggagggacctcacctgtcgcttttctgctgaggctgtgggactcctggcatcagttatccctcatgaacttggaattttggcttggcttttggaagtaaatgaaggcaagaaaactcccttccccaccctcttccttttggaatttgaaagccatagaagtcatcaggtccaatgccctcctcttattgaaggaaaagctgagtttcaacgtggagcagtgacttgcccaaggtctcacgggcaggtagcatggaccagggcactgaacccacctgggtctccagacaccctgggacatggcctttctcctctcccacgtctccagctttgggtccttgggctgagatgctggcgatgcacccaggcaggaggcctgcctgaggccgtgcctccaggcgcccaccctgagcttgtgtcctgagtccctgtagcttacccagggctgggacaagccccagctgtgagcatgggctcccccaaacatagttcttatctcctgctttgtttttcccaaggagctggatgatggcctggatgaagcgttttcgaggcttgcccagtctcggacaaaccctcaggtcctggacactggcctgacagcccaggacatgcattacgcccagtgcctctcgcctgtcgactgggacaagcctgacagcagcggcacagagcaggatgacctcttcagcttctgagggcccggggccagccggacacaagcggccctgacacgtgatggaccaaagccacctgctgcgggggagccagttctggggcccgcctgccacctctcccagccctcagcattgtcagcctgaagatcagagctgcagccagtcaggcaggggagagatttttcttttaagccctgctctttctctgagaaccaaaagatgccttgaatatttattcagtgacttctggcttatgctcagaagccagtctgcgtcaggcacgtctcctgctgcgtgacatgtgcagtgctgtaatcggctcccgcttgctctcctggagcaagctctgccctggctgtgggtatcaggactgtgaccaaagcatttctagtcccttctctctttctaaggacccaaatttccctgggggcatcctgcttcctgaaagctgttggatttcagtgatttttccccccaccccccagcacaggagagcacccacagccgcagaaggggaatgtgtcctcctgctctgcttcctcagggcccagcaggcgggggtttgagccctggaccccaggctcttagagactaaggggcagctcctgaccaaagacgatacagcttggcactttaaagcattaacagcaggtgtgaccctgagggctcctccatggtgctgcattgagtccagctttccttctgcccttcctccaggagaaggggcccaaggtccccgtggatggtctccacctgtgcttggaaccagtgtaactggctgctccctgctcccagggactgacacggggatcatctctgtgaccgccctccgtcgggcccctgcctgccttctcccctccacgcaaggctgtgctcttcctctggtttctgtgtgtccgtttgagtgtctgcgccccgcctccccatacttcctgggatgatgtgtgaaacctgacacctagatttatttggaaatattctatgaccactttacagatgaggaaactgaggcctcaagcgtggaggggtagagtgaagagtagaacccaggtctgatgccaaagctgctttcttctctgcctcctcctcacgcaactcacacctccttttcttctagctttgttgtcctcccaggaaccaaaaaaccccagctattttctgaccaaaatgtgtttcataacaaaccatctggtgcctttccacacagaactggcaggagcctcgtgtcctgctagctgtctctcttgttgatttccgtgaaaatgcaagtgtttgaagtctgctcattccgagggtgaaacaaaatccaaccctgtcagaatcatgctgttctctttgctgacactgtgaccctgggtcgggacagaccagcagcaatctgtctttagaatcgctttccttcctccccttttgcccccgtggggctcccggcatcctgaaagccagcaaagcctccagcatcttttccatcctgaggtgcctcccagtggcctggcttgtcggagcaagtttcatcagccctagggaaaacacggccctcctgggaacctccttacctggagtaaccggacaccttagacggaggtgcctgagggtggggtgggatttgcagggtcattatcagaacatgaggataacttccttgcccctgctctgtagccacctccttggcaccggcctctatttgtcataaggcggcgtgggcgaggcctgacacaggccagccttggcacgaggggggccaggggttctgagaagcgctgccctgtgagagccacgctggccttcgtctccatctctggttgacgggctgtccgtttgcctcctgtgtgtctgcagacaagtcttgctgtgctttatttgtgaaactttaatgaggaaaaaacaaataataaatgttctcgttttgaaactc

SEQ ID NO: 18910 - protein, 221 aa, Homo sapiens
MLFSLKYLGMTLVEQPKGEELSAAAIKRIVATAKASGKKLQKVTLKVSPRGIILTDNLTNQLIENVSIYRISYCTADKMHDKVFAYIAQSQHNQSLECHAFLCTKRKMAQAVTLTVAQAFKVAFEFWQVSKEEKEKRDKASQEGGDVLGARQDCTPPLKSLVATGNLLDLEETAKAPLSTVSANTTNMDEVPRPQALSGSSVVWVSGCVASRSVILSLTSG

SEQ ID NO: 18911 - DNA, 5846 bp, Homo sapiens
  CDS (47)..(352)
catgtagtatttggtttgctgttcctgcattagtttgcttagaataatggccttcaactgcatccatgttgctgcaaaggacatgatttcattcctttttatggctgcaaaattttttaatatttttgtatcaatgaggtctcactgtgttgcccagactggtctcaaactttggcctcaagcattccttgcacctcagcctcacaaagtcctgagattatacctgggagccactgcacccagccctttgatgcagttctcaatgacaccagtctttttttttttttttcttttttgtttcccttttagagacagggtttcgctctgttgcctaggctggagtgcagtggagtgatcatagctcactacagccttcaattcctgagctcaagcgatcctcctgcatcagctttcggagtacctaggagtataaacatgagccactacacccaactaatgtttttggttggtgttttttttttttctttaagagatagggttggccgggcccggtggctggctcacacctgtaatcccagcactttgggaggctgaggcaggtggatcacaacgtcaagggattgagaccatcctggccaacatggtgaaaccccatttctgttaaaactacaaaaattagctgggcatggtggcgagcgcctgtgatcccagctactcaggaggctgaggcaggagaatcccttgacccaggaagcgtaggttgtagtgagctgagatcgtgccactgtactccagcctgggcgacagagcgagactctgtctcaaaaaacaaaaaaaaagatgtggtcttgccatgttgcccaggctggtctcaaactcctaggctcaagtgatcttcctgccttggttcccaaagtgctgagattacagctgtgagccactgcacctgacctttttttttttcccccctcctttttttttgagacaggttctcgctctgtcacccaggctgaagtgcagtggcatttgaggtcagtctcaccttgacctccccaggctcaaacaatcctcccgcctcagcctcctgagcagctgggactacaggcatgtgccaccatccctggctgattttttaaatttgttgtagagatgaggtctcactatgttgcccaggctggtcttgaactcttgggcccaagcgatcctcccgcctcagtgctgagattgcagtggtaagccaccatgtccagccaactctttaataataggcagttctgactggtgtaagttctgactggtatctcactgtggttttaatttgcatctctgatgattagtgatgtcgggcattttttcatgggttttttgtttgtttgttttgagacaaagtcttgttctgttgcccaggctggagtgcagtagtgtgatctcggctcactgcagcctccacctcccgggttcaagccattgtccagcctctgcctcctaagtagctggaattacaggtggctgccaccacacccagctaatttttttagttttggtggagacagggtttctccatgttggccaggctggtctcgaactcctgacctcaagtgatccacccacctcggcttcccaaagtgctgggattataggtgtgagccaccgcgcccggccctcatgggttgttttgttttgttttgagacggaatctcaccctgtcacccaggctgcagtgcaatctcatgatctccacttactgcaacctccacgtcctgggttcaagtgatgctcctgcctcagcctcccgagtggctgggactgcaggcgtgcacccacgcctggctaatttttatatttttagtggagatggggtttcaccatgttggtcaggctggtctggaactcctgacctcaggtgatccacctgcctcggtctcccaaagtgctgggattacagacgtgtatacacaagacacaaagatcagctcaggatgggtcataggcctaatggtaaaaggtaaaactatgaagcaggctgggcatgatgtctcatagctataatcctaacactctaggaggccaaagctggaggacactgtagcccagaagtgtgagaccagcccacacagcatagtgaagccccgtctgtacaaaaaaacaatattaaaaaaaaaagaattagctgggcatggtgagtggtccacgcctataatcccagcttctggggaggctgaaatgggagggtcccatgagtcaggaggtcgaggtcacagtgagccatgattataccactccagcctgaatgacagagcaataccctgtcttaaaaaaataaaaactgtaaaacagttattaagttgaatctcttcagggccttggggtacgcaaagattcttttaggcaggatgcaggaccttggggtagaacacagaaaaacactggcataaaaataggtaaattgataaataaatttatctaaacaaaacacttgtgctcatcacagggcactgttagaaacatgaaaaggcaccaatgggggacgcagtattagcagtacatacacacaacatgacttctatctgaaacttaaaaataactctgcctgttgttaatcaaacagaaagcagaagaagaagctgggcggagggtgaaacgtttcacaaaaggaaatgcaggtcgggcatggtggctcgcgcctgtaatcccagcactttgggaggccggggcggtggatcatttgaggtcaggagttcgagacagccaggccagcatggtgaaaacccatctctactaaaaataaaagaaattggccaggtgtggtggcacgtgcctgtggtcctagctgcttgggaggctggggtaggagaatcgcttgaacccgggaggcagaggttgcagcgagccgagattgcgccattgcactccagcctcggcaacaacaaaaaaaaggagatgcaggaacagtcactatcattagtcatcagggaaatgcaaattaaaacatgagaagccgttacacattcatcagtgtggctcaaatgaaaaaaacgcgacaatgtcaagtgtgagtgaagatgtgaagcagctgggactctcgtaccttgcgagtgggaggcaaaaccgtgccaccctcgcgagaactgtgtctcagggtctcagaaagttcagcacacaattcattaccctgtgggccggcagattcattcctaggtaggttttttgttgttgttgtttgtttgtttgtttgttttgagatctcggcttactgcaacctcggttcactgcaacctccgcctcccgggttcacgcctttctccttcctcagccttcctagtggctgggattacaggtgcgcaccaccacccccaggcacagttggcgggcagctcccaggtctccatgagtacggcgccgtcgggggctccacacacacggccactgcagccatgtgggcctgtcagcactgcacgttcatgaaccagccaggcacaggccactgcgagatgtgcagcctccccaggacctagggcgcctgccctctgctggctaggtccgggcccagcccagcccttcctgaagccagaagcgttgctgagtgtgttccctgtaactgccccatagtgggcagccctggaggaacaaggggctggctgtcctgggctccctgacccactgaagcttctcagcacgttcctccctggagagcgggcgccacggctggtattctgcaggctgaatgcagtctccagactggaaacgcagagcggctcctcacgcctaatcctgttgacaagtcccccgccgtgttggaaagacctctcgcctctacgtggcacctggaattggggcgcacagggaggggcggatgctgccaccacccagccttctctttattttcagtgctttttgtttggcctccctgcccccatgtttttctggctgggagctcttggttacccccttgtctgactgcttggtggcaggcaccctgcctgtgagggccactttcctcttctagtagctgttgtctggtggggacgcagtggccctggacacggctcccctctgcaggtctgcaggtcggtttgctgcctgccctcctcctctcacccgatgtccaggtgggattttaaagtctgcattggttataacaacagttatcagtaattcctgcccagaagacttttatttatttttttttaagataaaaactgcacaaaaggggagtgagagagactagtttccacatccttccctcctttagtgaagcccccgaggttgtgtccagggtgatgagtgtggacgggggcaccagtcagttctcccttgaagtaaacctcagtgcctgagacttttctaccaagccacacagctgcagcaactgcagatactgcgggctgagcaggagcagtggtggcgcctgccctgaggctgccctgcgatggcctgggtgggagagctgggtcaccggtgccgatgctctggccctccccaatacgctgcttcgtcccactgcaccgcctggctgagggcgttaggggctgtgcctcttgtgagggccatttgggacctccctggggcactgcacaattgatagtgtaccaatagagggagactgggcgatctggaacagcacgtggtggggtcctgcttgtgtgctctgcgttcctctgtggcgtggccaggccggggcatggctcttacccggggagtggtgggcatctcgatgcttctttgccttaatgatggccacatctgggctgctctgcacccacgggagaggctggcccagctgcagactgcttagggacttctgtgtccatcctggggggtaagcccatgtgacccacattcttggcactatgaacagagaacatttgcctgttggcttctgaagtggtcagggccatggctgacacctccaggtccgcctggcatgggacaccaagtggaagacccaagcagctcatctgctcttgggaccaggggccagttgggttgggtctggtcacggcagagctattgtggagggtcaggaagggtggagaggagctgggttgaagcggactgctgcggatgcaactcccagcttgcccaccgcgggctgtctgctctccctcctagcagctgtcacactgaagttttgtcctctgctgtctcctctggtcctgagatgagctgtgagcctaggtggccaaggcttcctgcattgcttccctgtgagtccaaggccttcccccaccactgggcagaggctggacagcacggacttctagagagagccgcgttgccagttcctctcccactcgctcgtccttatccaccacgctattatagtttccgttgtcctccaccagcatttcccttactctgaagttccggcattcacatcattcatgttttcttttgtcttttagctaaaggaaaagcattggcgatttgtctgattctggttttgagttactctttgttcagtaatgcactttattttattgtccaaagagagtcagagctaagcatacaggcttgggggtgagccctgctgtgagagttcaggccctgggaggctcagccacctcctcttgtgggaaggaggtctcagccccacctcgcatcttcacctgcccttggtgtggacacaccctctcatgctaccagcaccataatccagtgggggtgactgggtgcacacctgcccaggtgaacacagcggctgccagtctcctggtcccgagaggaggtggggcctggccctggctccctccaacaagctgctcctgggacacaggtgctcctgcttcggctctgtttcggctcacaggtgtgcatcactgggcttggatttgcattacattgaccccagccctgcagtggaacctaataaaagcgcctgaagc

SEQ ID NO: 18912 - protein, 102 aa, Homo sapiens [sequence omitted]

SEQ ID NO: 18913 - DNA, 4588 bp, Homo sapiens
  CDS (4061)..(4459)
atagatgccccctcctttgtgcctagctcctgcgaatccaccgagtgcctgagaccatagcttctactgtgcccacccaggcagggaccctcggccccctctcctccatttctgagcccccatggccagatcctgggcagggaaatgatcctttcaggagacaaccagagcccctcaccaggaacgggggcacccgtggactacgggagggtggcggttgggttctctgctccctcccagctcctgaacctggaacaatcggcagaaaacccaggaaccccggcactcctgcattcagcacgggattcccccacccatgcccagaagccctgaccttgctgtttctggaaaaagcatggggtggggcagggagggctggcatttcccccagaagaccttgccctttgacctgcccactctccacactgcctcacctggaaagccatgtcctgctggcctcattccttcctgaagggcctaggagtggggaggcctgggtagggctgccacaggctgggtagagccgccctggcaggaagcagggggtaaggtggccataccagcacatgctgcactaggagcagagccctgcacctgcctagctgccttcctgggagaaacctccctgggagaccatggccccaagccctggcctctagtgatacgcccctcgggaatctcctgttccggggcctgattctcaggaacaccaggtttcagaccatcttcagcacctaatgttgatgggtgtcaaacatctcctggagtggaccaactcgcaaccctgcaaagtcggagctgctgagaaggggcagctctgaatagaggggcatctgcctgaacctcacttttcctggggccctctccttgaccccgtagccaccaccatactgcttccagggggtccagctctgcttcccttcccacctgtcctagagtggacagagctttttccttgggttctctcttgcatcactaagttcagcagggaatttgcggaattttcaggaagaactttccccagtaataagggagaacagaaagaaaatcctagaaaatacagagtatccatgctggcagctttttgtacgacacccatagggacccccccaaatagctattacaaaggggcagcccattcactacacaagaaccccacacctggcttccaccctccccagctcctgcacttctccccagagcgggaccctcttacttccccccatgaaggggggcaccttgtgctaaggccaaggctgagcgaggtcccagctcacctccctgcttgatccagattgcactgtgatgagcacattgctgacctaggccagtcctggggcaggcgtgctctctctcccatacataggagtggcctcaaggccacccagtgctgaccccaacagagccctgaactgtccagaaactgcatcctcagcacaggaagtacccacatggacagagggaagcccagcctcggggccggttgcctcctcttctctgggtgttctccagtggcttcttggagcctaggctggtttatctcccctgcctaaaaggccctggggttgccaatgcaaattcattaaaacgaagaccagatatcccagactgcacagaggccgagagaaatggtatagtgcgtgattagcattgctgccctccaacctcctgggattcatgcagataatcagaaactgactatgactcccaagttctctgaaggatgagatcacaactgacaactcttacgacagagggagagtggtgagagagagaaagagggtactgggctagagccatgttcttcctgccgaggtgccagggggaggcgacagtgggcagggggtgctggggccttacctgtctgccctggtggggatgaaagacaggtgacaggcaggtgccctgtgcacagccttatcattgaagacaggcccaggacagcctgccccatctgccccagccccatgggatggttggtccagcctgactggggcaggattagctgcaattcctgccctgtgtgtcgtccagccagactgcctcttgaaagatggcttgtccaagcggcagacagtggtagaacaacccagggcttggaaatctgacctccttgtccatgccaacagcctgggagatgagacagggttagaggaaacagaggcccaggatacggcaggttctgcctgggagtgtacaatggttggagtccagagccaacgatgtggtccccagcggggtgtgcccctcctgctgacgagggtacagatccatacccaggtcaattcctcccgggcccctgtttggaggctgctacagccttgagttccttggagagagaggacacgcctgtggaatgtcaccttcagtcccgtgcaggcaaaaggcccctgcacaccagggccctaggaaagcagcatcaggtgctgggatcccacccagctggcacgggcacgttcttgccctgcacactccatgctgcccttccctaagctcgcaggggcagacaccaagagaagggcgcgtccccgagtcccctgggtgacctgtgtcaggacagcaggcaagaatgaaacgtggccttggctgacgggttggaatatttgtgaccgttcttgtctttctccctcctgcttccccggcaccctagccccatctccaggagcccctcaggcagagtaagtggggagtgtgtccagggatttttttgtgtttaccaaggtcctgctgtgcacttagaatctgtcaccataaatacttatctcgcagttaccccagcaagagggtgttatttcccccattttataaaaggaaattaaggctgggcaaagttaagacttgcttgtcagtggtcatggctgttgtcttgccacccccagctggggagaaggaagaaaactgggccgggaacccctcccctcagtgtcccccagttctccatctccataaggagccatcaggctgtcattaaggaacagagtgtcactcagggggcactgtcacaaagcagcacccatggcacatgggccgggggtgcagaagcctggcttatttcaggctgacagctggaccctctgggtgcaggggctcaggcagtggccaagagcccaaagggctaaggcccgtgacgaccacccagcccgtcaccccaggtacaaacactgaccccaaagcaagagcagggactgtccctcagccctcagggccttcatgcagggtgcagaatctcatgtccacatggaggtcacccctcaggtcacacccactcccagagcaaccctgggcagggaggggcaccctggggttgtgttgaccacctccccttcaggtgaggcccttttctgccttctttctagccccctgcatggggcacctgctattgctggggctctggggtggaccctgtgtgatttctgtcagggagcttgtgctgtgcatggccagaggtgtttacatccagaagggcccagcacggccctgtggggtgtggggggaatatggtagatcattgtgatgtgcctcggggccctcttgccttggagccagctttgtttcagaatctgctacttgggccctcttcagggttttgaggctggagaagtgagttgggacagtcactgtcatcaccacccaccctgtcacccacctggaaaacattcttgatatactggccatgctgggccgggctcacatccactgagggtatagtgaccaagcatctaaaccagtcgttctcaaacttcggtgagtatcagaatcacctggaagggcttttacagattgctggccccaccccccagaatttctcatcaggagtgggcaagaccaatcatttgcatttctaacaagttcctaggagctgcagctgctggccctggaaccacactttgagaaccactgctttagaccaaacaccaaaggaagatgcagccaccctcctttacatgtcacaacgctcagggtccatgagtacctcaggctgtccagctgagctccacctgcagcagccgagattcccgactcgctccaccattgggggctaggagtgaagcgtgtcaccatggtcagctcatggccagccaggaaagcctctctgctgtgcgtctgtgcagttcttgttcttccctggaggactcttggatcgcctgtgatcttggccaggagaccaggtgcctgggtcccttcctggaaggggacaagttacacaccccagccccattttcccaccaacttctacatgccttgggagaacctgctacatgttggctgcccccttcccctatttcagcagtgcccagtcctgcttatagacctgaggcctgctccccataccctgccctgtgcaagtgccagccgttattccaggcagcccaatgttgttgaggccagatggattcctggaagcagctggcccatggatgtgagtcatcacagtattctagaaacagagaagaggtcttaacctaatgcgcatagagaaattgttctcattgtaaacatacccctgtccttagctgatctaggtggaagcccagcttcatgtgctagggggcatgataatgataataaaggaattgtatctaggact

SEQ ID NO: 18914 - protein, 133 aa, Homo sapiens
MVSSWPARKASLLCVCAVLVLPWRTLGSPVILARRPGAWVPSWKGTSYTPQPHFPTNFYMPWENLLHVGCPLPLFQQCPVLLIDLRPAPHTLPCASASRYSRQPNVVEARWIPGSSWPMDVSHHSILETEKRS

SEQ ID NO: 18915 - DNA, 6153 bp, Homo sapiens
  CDS (3274)..(3723)
gaatattatgaatagaaaatgtattttttgtttgttttgcaaggaaggatataaagaaagagtaattttatatgtggaggaatcctgtatagtaaattccctatcctagagtaaaataactttaagaaagaggtagtatagaacatgtcaggaaattcagctatgttgtagatggtctgtgtaagtcatctgcacagtgcatgagtgtggaggtgggcgggcactcattggcccttgaactccttttgagcagtatggaagccaagaactagaagccaggaaatggggttgtaaaactgatttgtctatggattttatgtgttgagctgctgtggtcttggcttgtagtaattacctatatgaaccttccctcctcccctttagaatttaggacaggttcaaaaggccctccaatataaaaataaaatactgtccttccccacaaaggaaaaaatagctccccggttcaaccaggagacttagtcttgctaaaaccttaaagacagggtaaagacagggataccccaagaatcaattacaatgaaatggaaggggccttatcaggtattgttaagtacccccactgctgttaaacttcagggaacacctacttgggcacacagatccaggactaaacctgtttcttatgagtcacaggcacaaaggaagggcactacaaccacaaccaatatcagtaaagctttggaagacctctgctacctatttaaaataatcaacactcagccagaagaggtaatgtaatgctgtagatgggaataggagcattgatcttgctcttcttcctgactgtagtacttcctttctatggctttaacagccacctcctcctgggaaacatctcctgtgggcttgttgggtatagaagctactctaagacccaaccagataccatgatgccactgttaattctgtttgctcttctaattaacctaagctagtgtgtatgtggacagggagggtggacaaaattctacagtaaatatttcaaaaattatagcatcatagaatcatctttatggctgccagatttgtcatcaacacccccaggatagacagtttcatcttccgacctatctggaaaatctcaggaccatgtccccagacctcctaactaaccatagcaccccaaaatacccaaacccctattgtgaagtggaactcttccccacttagtggatcccccctggaccctgctgtccccctgccctgaccactattatcggaatctgggaagttgggcatctatatctccagtgcactcataactccaacatttgcatccactcttgcattaatgacacaaaagtggaagcttccctgcgatgctctggtccaactctagttgccaagtttccaagaccacggggaggtaaatgagattccatttgtgagtgaaaagaccatatatggtaccttctcccggatgggaacatacaaaggaaaaacaactgcctgatctgggaaggtgacagtactaccttcttctagaaaacaaagattgttcaaccaccaccatgagaacaggtggaaaatatctctatagacccaacctggcaatgaagtataaacatcgcaccccgcagggcttctcttggtgccctagttgggttcatttttgtttgtgactatgaatgggaagaagtcacaccctgtaaccactccaactccctaaggagtcacctcttctttaaggaatagctttcccttgtatctaaaaaacttggaactgacatgaatgaacgttggccactcttacccctccaggggtcacaatctataacgcctaggacccaagaatatcagaaataagtaagcaataaaactaattctggcaggaatcagggtggcaataggactagcagcaccctggggtggctttgcctaccatgagttaacgctaaagaacttggctcaaatcctagaatccttagccaccaacggagatcaggcattaaagagaattcaagagttccccagactctggaaaatgtagttgttgataacagactagcattggattatttactagctgaacaaggtggggtcttgtgcagttattaataaaacctgctgcacatatattaactctggacaggttgaggttaacattcaaaagatctatgagcaagctacctagttacatagatataaccagggcactgcccccaactatatctggtcaaccatcaaaagtgccttcccaagtctcacctgtttttcacctcttctaggacctttgacaactgtcttgttacaaatgtttggtccttgcttctttaacctcttagtaaagtttgtgtattctagattaccacagttccagagacaatgctggcacaaggcttccagcccatcctgtccactgacacggagaatgaaatcgtcctgcctctgggctccttagatcaggtatccagagatttttactcctccagtgccaggcagggccttcgtccataaactcagcaggaagtagttacggaaaacagatctccgcccttctgcagcccccttaagattaaggaggagtatctaatctctgaagggggaatgaggtaggaggtgggactcaactctggaagtggggctcaggcactcagaccaaactgagcactagctaaaataggtccagggcagatgctagtttccataggacacaccgacctgtgtcaagtcagttcaccatggctctggcagcacccagaagttaccaccctcaccctggaaatgtctgcataaactgccccttcatttgcatataattaaaagtggatacaaataccactgcagaactgcctctgagctgctactgtgggcgcacagcctgtagggcagccctgctttgcaaggagcagcgcctctgctgctgctgtgcacagccggccgcttcaataaaagttgctaacaccactggcttgcccttgagttccttcctgggcaaagctaagaaccctcccgggctatgcttcaatcttagggctcgcctgtcctgcatcactgggatcatctcccagtaaactagccacacttacatccatgtgtcagggacatttctggagaaagcagcccaggacactgttgaataaaacacacaatagtctctgtggtcttctccaccccaccctacaccaggcaccctcagcttgattctcctttttaattgcctgtaagcagggaagcacaatgttttcacattctttgtaaggcctttgttctactaaaatctaacctcagagcacaattttaaactagatgaaagagttgctgcgcctgaagcactgcaaacacctcctcaccacacatgtgcactcaccctggacaccctcactcaccctgacaccctcactcctcaccctggacaccctcactcaccccagacaccgtcactcctcaccctggacacctcactctgcaccctggacaccctcactcaccctgaacacgttcactcaccctgacaccctcactcaccctggacaccctcactcaccctggataccctcactcctcaccctggacaccctcactcaccctggataccctcactcctcaccctggacactctcactcaccctgacaccctcaatcctcaccctggactccctcactcctcaccctggactccctcactcctcaccctggacaccctcactcctcatcctggacaccctcactcaacctggacaccctcactcctcaccctgacaccctcactcctcaccctggacaccctcactcctcaccctgacaccctcactcctcaccctggcaccctcagtcaccctgacaccctcactcctcaccctgacaccctcaagtcttcacctccctggctgcagcctgggacacgctttccctaacttctgaaggctcagtcctcctcaagccaatctcatctcaaattgcacctcctcagagaggtcttccataaccgcccttataaagcaggattctttcaccaataccccttcccacatggcactgtctcacagcactcctctaaaagtctgtttacttccttgacaatctgtcttccttataaggggaggttctgtaaaagccaagactctctctgtctagttgactgttgcataccagggcttagaccaaggccctgacatgcagtaggtgcttaatatgttttgaggcaaggtcttgctctgttgcacatgctggagtgcagtggcacaatcgtaattcattgcagccttgaactcctgagctcaagtgatcctcctgcctcagcctcctgagtagctgggactacaggcatgcaccaccaagcttggctaatttaaaaaaaaaattatatagatagggacttgctatgttgcctaggctgatcttgaactcctaacctcaagcaatcctcccacctcggccttccaaagtgctgggattatagccatggagccgccacacccagccaatgtgccgaagaaagaaagaaaaacatgctcatcctttgagtcaggttcaaattttttctcctctttaacccccagtcactccagttataagtgatttttaactcttctcacaccttaatgcatctggcaagaagatccacgtggtgttaggaacaatacaggaccttaaggatgggggaatcagcaggtgtcagcgtgccctgtatgctcagggcagctgtttccactggacattctccctttgcctctctgggcagcaactcctaggccagccgacctgctgtgtcgagtaaccaggatttctcaatcttggcatggttgccattttggaccagatcgttctttgttgtgggggctgccctgtacggcaaagaatgccgagcagcacttccagtctccacccacaggacgccagtagcaccctctaagttgtgagaactcaaaatgtccccagaggatgccagatgtcccctggggtggggacacaatcaccccaggttgagatccatggagccaggtctgtttgccaccaaggggtaaagctccattcccaccttaggagggctaggaggcagcatcgtggggccacagaaggcctgggtttgcagtcagaggacaggatgcacattccttcaagatacagacccagattgttgggcatctagttcttgggttttctgttgttgctgttccgttttgtctgtcttccctcctttgtttactagcagcctggaatttgccactttttctaaacgaagatttatggaacacttaccacacggctgacgctgcgcgaggctaaggttctaatacaccgcagctcacttaactctcgcaataccataaacgcacactgtttcatcttgaccctttcttgggaaggtgacagagaggtaggagggctaacatcttgtgtgccccgtcccaagggtattactggtggaataatatccgccccccaccccagtttctaatttgctgtaggctgtgacgctgtggggcaagactaggagtcctgttgaaattaggaataagtgtgctgtgagggaagggctgccttattttagagcacagattttctgaatatctattttgacaggttcgatcctctccccttcctgccttccttctgtcgattttcaatgtcttgatggtgtcccacctgagtggcctttagagatgtgagttgtgaggcactggggaggcaggcacacgtcctccagcccaagactgcctaatttaacagggatttctgcattctggaacaagcctccattttccccaagcaggattactccagagggcaaaacacagcccaatagtatcacatttcctttctgctttagcaaaaataaccactgtctcattcatgggaaaaggccgccaaacaaatttgttactggaaccatttgtaacaacttctagtttgcactgccttggagcaagcacactttgtagaggagggatttgcagttacttgggcaacaaggtaaccactgatcattacaggaagcttcagaaaccgtgggaccagtgtagaagaatggagtatctgtccaaactaagaataaaaagaatgacacttgtaaaaaaaaaaaaaaaaaaaaaaaaaaaaaaaaaaaaaaaaaaaaaaaaaaaaaaaaaaaaaaaaaaaaaaaaaaaaaaaaaaaaaaaaaaaaaaaaaaaaaaaaaaaaaaaaaaa

SEQ ID NO: 18916 - protein, 150 aa, Homo sapiens
MKELLRLKHCKHLLTTHVHSPWTPSLTLTPSLLTLDTLTHPRHRHSSPWTPHSAPWTPSLTLNTFTHPDTLTHPGHPHSPWIPSLLTLDTLTHPGYPHSSPWTLSLTLTPSILTLDSLTPHPGLPHSSPWTPSLLILDTLTQPGHPHSSP

SEQ ID NO: 18917 - DNA, 4864 bp, Homo sapiens
  CDS (702)..(3971)
cttcaccagtagaaaattctgattgttccacaaatagcagattatctttctctcctgaaaatatcctcatccaaaaccaagacattgtgagagaagctgcagtgcagggagatgggcagaagcaaaggcagcctcaggccacagatctggactccagtgggacacatggcagtgagatgcttccagccacagaagtgactgtgtcaggagggttttctgttgaagaaaccagctgtggagacacagggagatctggtggtgaggccctggctgttgcaaatgattctaccagcacaccacaaaatgctaatggactttggaaattgaaatctacaactcccggtggtgctttgcctgagtgttttggcaccacagacactactttttcttcagcattttgcagaaaacatggagagacacaggatacctcccaaagtagcctgcctggtaccttacattgttacacaggcattcgagaggggggagacgacactgaggtagagagtgaggcatttagctgcagtgaggggagcgaatagcaagatgctcctgatgactcacagaaaaatttaggagacacagatgctgctgtagccgaggtgagaccttccttagaggtaggttatttgacgtcagctctgcaagattttaacataagtactttttctgagctggatagactttccacatcagaggttgtgatgtttcttgagagctgtcagttaggggattatagttcaggggactctgtttctgaatgttctagtaaaggaaccctaagtaaagaaatgaacaaagaattaaaggcaagtgaaataggagaaaaatacagaaagcaaccctgtgaggaagaaacacttggaacctgtgaagagtggattgaatcagaggaagatgattattcgttaaaaaatacaagtcagctcactcagtgttctttggaaactctgtctgaggttctgaccaagattaggcaagaacttcaaacaaattctgaagattgcaatggtaaagatactggcagtttattgctcttaaatgtaaataacaacatgaccactgagaatttaaaagagaaaagtccatttcgggaaacgactggctcctcatcacatgcttcagaaccaaccccacaagcagctgccttggacactgagggcagctctcccatcagcggtatgcctcagaatgaaaaccctcagagcagaccagaggcccgttcagatgcaggcaggcaaaccgatggtggggaagaagacctgccagaacctgtggagccatcagccttgtgctctgactctgtgatggagccatccatagagcaaagttctaactgcgaggccgaaacaacatttcagtgtcagatagcaacagtgacctcagaagttataaacgtacttataaataaggatcagaatctagtcattgaaaagggggacaactggacaataatcagtggtgtagctgtcttgccacatgtggaccaggtcacactgtgtgacattcctggagacatccctatttctcaggatcaaggagagctggaagctggttgcatcccagtgacttctgctgagaagtccccagaggccagtcacactggccctgcatttcaggaggctccatgtggcaataatctttcatgtccccaagaggatgtttcaagcagtggtcggagcaccaactttgataagagtcgtttgcgaaatagacccgttaagcctagtatatggattagttctcaaatctatgatcaaaacttcgagactcagattgttgcgtctgatcacacatattataactcaaaactagagccatctggcaaaaataagaatcgatcaaagatttcaaacaaagatcagtcaaacaaaccagtaaaaacttcagcgtcgagcagagttgaaactcatcagagtgaagttgctcagtcattttcaggggaaaaagctaatacaaaaactcaaagaagccaaactcagaccattttagcaaatgctgatacatccactcctacagattgttctcctgacacactgagtaaaatacggcaagaggtggggcctcctttgccgcctctgcttgctcctctgatagctacacctccaaggacttcacagccactgtctccactgatatcgagttctagtccttcctcaccagcctctcctgttggccaggtttctcccttccgtgaaaccccagtgcctcctgccatgtctccatggccagaggaccccagacgtgcctctcctccagatccttctccatctccatctgcagcttcagccagtgagagggtagtgccgtctcctctgcagttctgtgcggccacgccgaagcacgcacttcctgtgcctggccgactcccaccctgtgcatctggccacgctgctgtgggagggcctcaggagaattctgtgaaaatccttgacaccatgtatccagagttatctgccagggcccggaccctcaacatcctcaaagggaatattcaactcacacgaggtccgcctgctgactgtaagaatttaccgggacctgccagtgctatgataggattcaaaacgatcacttcagcagcaactgcttttgtcaaaactgggagcagctctggtggtgactgtaaccaagacaagtcaagagatttggggactcagcaggattcaagcgggaaaagaacactgtcaacgtctacactgagaagtgctaaaagactgcgcctggacactgggtccccagaaccagaaaccaggggagtcactgcagaaggaatccacaaaaacctcccagggaacctccctccagctgaagttgcaacaacaaatgaggaaagaagttgttctagtccagccgtcagtgcagtttcacagttgcctttaagcccaaaagaaactgtggagtcccatgataaagccatagctaatgtcctgaagaaaattgcagagttttcttttgatctgttacctgtcattcgtagtcatgtgtatgtgggaaatatctccaaaaagcccgtaatgagagatcaagagaaggaagttgtttatgaatttagcacaacaaaaaagcatttagcagagtgcttgcttcactctattctctcagaactaaaaattcagaagatatctatggaccacaattacattcacgccctctgcagggtgtatgtgggtatttgtcggcaactcggagacttggaaagagctcgtttgttttgctacagcctacttaaagaagattttccggagtctgaaaaattaactttgtttattgcaaacatgtggcatgatatatttctctctcaatcggtgattaataaagcaatgcagttagttgccaggcaacgtgctaaaggagaggttctgaactgcttgagagcttttcttaattgggaaaagaatgccccggtagatgttggcttcatggtttctaagctgcttttgaccatacagttatgtccaaaaacagaatttcaacctagtgaaaaatttggtgaagacctaagtgataacatttgggaatacatatttgccattgatctgctctgctgccatcagaaatggatctggacgcatgataacatcataagtaaggagctgtggcctgtgatggataaatggataaaatacagaaaaggacatgcaaacattgcgtatactcctgatattattatagcctcaatactgaggctgattggtcgtttaggccaattgggtttgaaagaaggatttccatctgctgtgaaaaatattagttcggttattggtatgtttatacagcatgctcacgatgaagatataccatggggtatacagttagcagccgtgtatgctctttgtgacttgagtcccagcaatccagcagaaatttccaagatcctggaagcttggcggagagaggcctccaaaagcgttccgtctgcgattgtcagctgcctagaggaagtcagtgccctgagcacagaggagcttggctgacctgggatgccactgaggcttgagaagtgccttgacacattttgaacacaaatagtttgatcagctttcagaatacaaagggaggtttcaaaacaaaaagacataaaatagataaaacagaccagaggctctccttattgtttggcaaggagacaggagaaacaagcagtcgcatagtcgtttttccctaaatctaatacgtttcacttaaggctgttgtgatctgtgacatatgggttatattattgtgtctttgtcaaacaacaaaaacttgaacttagcccttttttttgctgcagaaagtgtccttttagtggcttcttaaaattgagtggcattttataatgaacttaccaatataaaaacatgatttggttcctgagctgttgttgttggacttgtgttccaatgagtgactaggaaaaaataaattggcaaaaacctagagttttctgctatctttgctggaaatgagttgcaaaagtttttctcaagatgtagtgcgtaattgatcagagcaaaacatgcagagcccttagcagaaacccactttaatgcattttcttcatatccctaaagttccttaaaaatatgtgacaatgcatcaggaagaggagaactgaagagtagaagttcccttgcagatttttttatcagtgacatgtaatgagcaattcacagatgagcgcaggcagagctctgtgtgccgtgtacatatggaccgtgctatgatgtgtctcacattggatgatattccactttgggaattttagtatttgtatatagaaaatgggtttaataactcaccatggttttgatttgtcttatattcgttatttcttaaaactcttgtatgtgtttttataataaaaaataaaagtaagccatgg

SEQ ID NO: 18918 - protein, 1090 aa, Homo sapiens
MFLESCQLGDYSSGDSVSECSSKGTLSKEMNKELKASEIGEKYRKQPCEEETLGTCEEWIESEEDDYSLKNTSQLTQCSLETLSEVLTKIRQELQTNSEDCNGKDTGSLLLLNVNNNMTTENLKEKSPFRETTGSSSHASEPTPQAAALDTEGSSPISGMPQNENPQSRPEARSDAGRQTDGGEEDLPEPVEPSALCSDSVMEPSIEQSSNCEAETTFQCQIATVTSEVINVLINKDQNLVIEKGDNWTIISGVAVLPHVDQVTLCDIPGDIPISQDQGELEAGCIPVTSAEKSPEASHTGPAFQEAPCGNNLSCPQEDVSSSGRSTNFDKSRLRNRPVKPSIWISSQIYDQNFETQIVASDHTYYNSKLEPSGKNKNRSKISNKDQSNKPVKTSASSRVETHQSEVAQSFSGEKANTKTQRSQTQTILANADTSTPTDCSPDTLSKIRQEVGPPLPPLLAPLIATPPRTSQPLSPLISSSSPSSPASPVGQVSPFRETPVPPAMSPWPEDPRRASPPDPSPSPSAASASERVVPSPLQFCAATPKHALPVPGRLPPCASGHAAVGGPQENSVKILDTMYPELSARARTLNILKGNIQLTRGPPADCKNLPGPASAMIGFKTITSAATAFVKTGSSSGGDCNQDKSRDLGTQQDSSGKRTLSTSTLRSAKRLRLDTGSPEPETRGVTAEGIHKNLPGNLPPAEVATTNEERSCSSPAVSAVSQLPLSPKETVESHDKAIANVLKKIAEFSFDLLPVIRSHVYVGNISKKPVMRDQEKEVVYEFSTTKKHLAECLLHSILSELKIQKISMDHNYIHALCRVYVGICRQLGDLERARLFCYSLLKEDFPESEKLTLFIANMWHDIFLSQSVINKAMQLVARQRAKGEVLNCLRAFLNWEKNAPVDVGFMVSKLLLTIQLCPKTEFQPSEKFGEDLSDNIWEYIFAIDLLCCHQKWIWTHDNIISKELWPVMDKWIKYRKGHANIAYTPDIIIASILRLIGRLGQLGLKEGFPSAVKNISSVIGMFIQHAHDEDIPWGIQLAAVYALCDLSPSNPAEISKILEAWRREASKSVPSAIVSCLEEVSALSTEELG

SEQ ID NO: 18919 - DNA, 2383 bp, Homo sapiens
  CDS (524)..(2167)
tttaccgcgtcagcatgctggtgcatttatttcgggtcgggattcggggtggcccattcccaggcaggctgctaccgcccctccgcttccagacattctcagctgtcaggtactctgatggctaccgcagctcctccctcctccgggccgtggcccacctgcggtcccagctctgggcccacctccctcgagcccccctagctcccagatggagcccctctgcctggtgctgggttgggggagccctgctaggccccatggtactgagtaagcatccccacctctgccttgtggccctgtgtgaggcagaagaggcccctcctgccagctccacaccccatgtcgtggggtctcgctttaactggaagctcttctggcagtttctgcacccccacctgctggtcctgggggtagccgtcgtgctggccttgggtgcggcactcgtgaatgtacagatccccctgctcctgggccagctgtagaggtcgtggccaagtacacaagggaccacgtagggagtttcatgactgagtcccagaatctcagcactcacctgcttatcctctatggtgtccagggactgctgaccttcgggtacctggtgctgctgtcccacgttggcgagcgcatggctgtggacatgcggagggccctcttcagctccctgctccgacaagacatcaccttctttgacgccaataagacagggcagctggtgagccgcttgacaactgacgtgcaggagtttaagtcatccttcaagcttgtcatctcccaggggctgcgaagctgcacccaggtggcaggctgcctggtgtccctgtccatgctgtcgacacgcctcacgctgctgctgatggtggccacaccagccctgatgggagtgggcaccctgatgggctcaggcctccgaaaattgtctcgccagtgtcaggagcagatcgccagggcaatgggcgtagcagacgaggccctgggcaatgtgcggactgtgcgtgccttcgccatggagcaacgggaagaggagcgctatggggcagagctggaagcctgccgctgccgggcagaggagctgggccgcggcatcgccttgttccaagggctttccaacatcgccttcaactgcatggtcttgggtaccctatttattgggggctcccttgtggccggacagcagctgacagggggagacctcatgtccttcctggtggcctcccagacagtgcaaaggtccatggccaacctctctgtcctgtttgggcaggtggtccgggggctgagtgcaggtgcccgggtctttgagtacatggccctgaacccctgcatcccactgtctgggggctgctgcgtccccaaagagcagctgcgtggctccgttacatttcagaacgtctgcttcagctacccctgccgccccggcttcgaggtgctgaaagacttcaccctgacgctgccccctggcaagatcgtggccctcgtgggccagtctggcggaggaaagaccaccgtggcttccctgctggagcgcttctacgaccccacggcaggcgtggtgatgctggatgggcgggacctgcgcacccttgacccctcctggctccggggccaggttgtcggcttcatcagccaggagcccgtcctgtttgggacgaccatcatggaaaacatccgctttgggaagctggaagcttccgatgaagaggtgtacacagccgcccgggaagcgaatgctcacgagttcatcaccagcttccccgagggctacaacacggtcgtcggtgaacggggcactaccctgtctgggggccagaagcagcgcctggccatcgcccgagcccttatcaagcagcccacggtgctgatactggatgaagctaccagcgcgctggatgcagagtccgagcgggttgtacaggaggccctggaccgggccagtgcaggccgcacggtgctggtaattgcccaccggctcagcactgtccgtggggcccactgcattgtcgtcatggccgatggccgtgtctgggaggctgggacacatgaagagctcctgaagaaaggcgggctatacgccgagctcatccggaggcaggccctggatgccccgaggacagcggccccaccgcccaaaaagccagaaggccccaggagccaccagcacaagtcctgagaagggccccctgaggtgtggtcgctgccaagcatcagtgttagggctggggctcagcctgggggagcctactggggactgagcccccaggagggccagcatgtggagagtcgctgcggctgctcctgctcacaataaagccggggccgagcagctggcaggggaggccaatccctccctcccctccccagtcctgccggctgcctccctccc

SEQ ID NO: 18920 - protein, 548 aa, Homo sapiens
MTESQNLSTHLLILYGVQGLLTFGYLVLLSHVGERMAVDMRRALFSSLLRQDITFFDANKTGQLVSRLTTDVQEFKSSFKLVISQGLRSCTQVAGCLVSLSMLSTRLTLLLMVATPALMGVGTLMGSGLRKLSRQCQEQIARAMGVADEALGNVRTVRAFAMEQREEERYGAELEACRCRAEELGRGIALFQGLSNIAFNCMVLGTLFIGGSLVAGQQLTGGDLMSFLVASQTVQRSMANLSVLFGQVVRGLSAGARVFEYMALNPCIPLSGGCCVPKEQLRGSVTFQNVCFSYPCRPGFEVLKDFTLTLPPGKIVALVGQSGGGKTTVASLLERFYDPTAGVVMLDGRDLRTLDPSWLRGQVVGFISQEPVLFGTTIMENIRFGKLEASDEEVYTAAREANAHEFITSFPEGYNTVVGERGTTLSGGQKQRLAIARALIKQPTVLILDEATSALDAESERVVQEALDRASAGRTVLVIAHRLSTVRGAHCIVVMADGRVWEAGTHEELLKKGGLYAELIRRQALDAPRTAAPPPKKPEGPRSHQHKS

SEQ ID NO: 18921 - DNA, 1374 bp, Homo sapiens
  CDS (320)..(1165)
attcattccctgtcctcggatcacagtctcttctcactacagtgtcgccgcctctgcctgcgtagccccggccatggctctgtagcctcgacccctttgtgcccccggcccgtctccgcgctcaccacgcctgcgctctccgctcccaccttctttcttcagccgaggccgccgccgcctctccttgctgcagccatggagtcttccactttcgccttggtgcctgtcttcgcccacctgagcatcctccagagcctcgtgccagctgctggtgcagcctctcctgttgccatcagtgcccagcacctgtgctacagccatgtcactcctggcgaccctggggctggagctggacagggccctgctcccagctagtgggctgggatggctcgtagactatgggaaactccccccggcccctgcccccctggctccctatgaggtccttgggggagccctggagggcgggcttccagtggggggagagcccctggcaggtgatggcttctctgactggatgactgagcgagttgatttcacagctctcctccctctggagcctcccctaccccccggcaccctcccccaaccttccccaaccccacctgacctggaagctatggcctccctcctcaagaaggagctggaacagatggaagacttcttcctagatgccccgcccctcccaccaccctccccgccgccactaccaccaccaccactaccaccagccccctccctccccctgtccctcccctcctttgacctcccccagccccctgtcttggatactctggacttgctggccatctactgccgcaacgaggccgggcaggaggaagtggggatgccgcctctgcccccgccacagcagccccctcctccttctccacctcaaccttctcgcctggccccctacccacatcctgccaccacccgaggggaccgcaagcaaaagaagagagaccagaacaagtcggcggctctgaggtaccgccagcggaagcgggcagagggtgaggccctggagggcgagtgccaggggctggaggcacggaatcgcgagctgaaggaacgggcagagtccgtggagcgcgagatccagtacgtcaaggacctgctcatcgaggtttacaaggcccggagccagaggacccgtagctgctagaagggcaggggtgtggcttctgggggctggtcttcagctctggcgccttcatccccctgcctctaccttcattccaaacccctctcggccgggtgcagtggcttatgcttgtaatcccagcactttgggaggccaaggcaggaggatcgtttgaggccaggaggtcaataccagcctgggcaacatagtaagaccctgtctctatt

SEQ ID NO: 18922 - protein, 282 aa, Homo sapiens
MSLLATLGLELDRALLPASGLGWLVDYGKLPPAPAPLAPYEVLGGALEGGLPVGGEPLAGDGFSDWMTERVDFTALLPLEPPLPPGTLPQPSPTPPDLEAMASLLKKELEQMEDFFLDAPPLPPPSPPPLPPPPLPPAPSLPLSLPSFDLPQPPVLDTLDLLAIYCRNEAGQEEVGMPPLPPPQQPPPPSPPQPSRLAPYPHPATTRGDRKQKKRDQNKSAALRYRQRKRAEGEALEGECQGLEARNRELKERAESVEREIQYVKDLLIEVYKARSQRTRSC

SEQ ID NO: 18923 - DNA, 3711 bp, Homo sapiens
  CDS (10)..(3201)
gaaataacgatgagcgatgaggagcggattcagctaatgatgatggtcaaagaaaagatgatcacaattgaggaagcacttgctaggctcaaggaatacgaggcccagcaccggcagtcggctgccctggaccctgctgactggccagatggttcttacccaacgtttgatggctcatcaaactgcaattcaagagaacaatcggatgatgagactgaggagtcggtgaagtttaagaggttacacaagctggtaaactccactcgcagagtcagaaagaaactaattagggtggaagaaatgaaaaaacccagcactgaaggtggggaggagcacgtgtttgagaattcgccggtcctggatgaacggtccgccctctactctggcgtgcacaagaagccccttttctttgatggctctcctgagaaacctcccgaagatgactcagactctctcaccacgtctccatcctccagcagcctggacacctggggggctggccggaagttggtcaaaaccttcagcaaaggagagagccggggcctgattaagccccccaagaagatggggacattcttctcctacccagaagaagaaaaggcccagaaagtgtcccgctccctcaccgagggggagatgaagaagggtctcgggtccctaagccacgggagaacctgcagttttggaggatttgacttgacgaatcgctctctgcacgttggcagtaataattctgacccaatgggtaaagaaggagactttgtgtacaaagaagtcatcaaatcacctactgcctctcgcatctctcttgggaaaaaggtgaaatcagtgaaagagacgatgagaaagagaatgtctaaaaaatacagcagctctgtctctgagcaggactcgggccttgatggaatgcctggctcccctccgccttcacagcccgaccccgaacacttggacaagcccaagctcaaggccgggggttctgtagaaagtcttcgcagttctctcagtgggcagagctccatgagcggtcaaacagtgagcaccactgattcctcaaccagcaaccgggaaagcgtcaagtcggaagatggggatgacgaagagccgccttaccgaggcccgttctgcgggcgtgccagggtgcacaccgacttcacccccagtccctatgacacagactcactcaagctcaagaaaggagatatcatcgatataatcagcaagccacccatggggacctggatgggcctgctgaacaacaaagtcggcacgttcaagttcatctacgtggacgtgctcagtgaagacgaggagaaacccaaacgccccaccaggaggcgtcggaaaggacgaccaccccagcccaagtctgtggaggatctcctggatcggattaacctaaaagagcacatgcccactttcctgttcaatggatatgaagatttggacacctttaagctgctggaggaggaagacttggatgagttaaatatcagggacccggaacacagagctgttctcttgacagcagtggagctgttacaagagtatgacagtaacagcgaccagtcaggatcccaggagaagctgctcgttgacagccagggcctgagtggatgctcaccccgagactcaggatgctacgaaagcagtgagaacctggaaaacggcaagactcggaaagctagcctcctatctgccaagtcatccgccgagcccagcttgaagtcttttagcagaaaccagttgggcaattacccaacattgcctttaatgaaatcaggggatgcactgaagcagggacaggaggagggcaggctgggtggtggccttgccccagacacgtccaagagctgtgacccacctggtgtgactggtttgaataaaaaccgaagaagcctcccagtttccatctgccggagctgtgagaccctggagggcccccagactgtggacacttggccccgatcccattccctggatgaccttcaagtggagcctggtgctgagcaagacgtgcctaccgaggtgacagaaccgccccctcagattgtacctgaagtgccgcagaagacgaccgcctcttccacgaaggcccagcccctggagcaagactctgctgtcgacaatgcattgctactgacccaaagcaagagattttctgaacctcagaaattgacaactaagaaactggagggctcaatcgcagcctctggtcgcggcctgtcaccccctcagtgtttgcccagaaactatgatgctcagcctcctggagctaaacacggtttagcaaggacgcctctggagggccacagaaaaggacacgagtttgaaggaacacaccatcccctgggcaccaaagaaggggtagatgctgagcagagaatgcagcccaaaattccatcacagcctccacctgttcctgccaaaaagagcagagaacgccttgctaacggactccaccctgttcccatgggccccagtggggccctccccagtcccgatgcgccatgcctgccagtgaaaaggggcagccccgccagccccaccagccctagcgactgtcccccagcactggctcccaggcctctctcagggcaggcgcctggcagcccaccaagcacaaggccgcccccctggctctcagagctccccgagaacacaagcctccaggagcacggtgttaagctgggcccggctttgaccaggaaggtctcctgtgcccggggagtggatctagaaacgctcactgaaaacaagctgcacgctgaaggcatcgatctcacggaggagccgtattctgataagcatggccgctgtgggattcctgaagccctggtgcagagatacgcagaggacttggatcagcccgagcgggacgtcgccgccaacatggaccagatccgggtgaagcagcttcggaagcagcgccgcatggcgattccaagtggtggactcacggaaatctgccgaaagcccgtctctcctgggtgcatttcgtctgtgtcagattggctcatttccatcggtctgcccatgtacgccggcaccctctccaccgcgggcttcagcacactgagccaagtgccttctctgtctcacacttgccttcaggaggccggcatcacagaggagagacacataagaaagctcctatctgcagccagactcttcaaactgccgccaggccctgaggccatgtagccaggcccggaatgggcctctctggacaagagccaccctttcactgtgcatatgatgctgatgcaattcctccatcatctctggacgtgtagaccagatccagaagaaaggcctggcgtgtggccaaacagcgtgaaaccttggcacaggactgaggatcctctcctccagaaaagccccctcgaggaaataaattagtgcggttctctttgacccccaaagacaagacaagcacttatttttattttcagaagacaaaagaaccaagatgccaactggctgcgaatgctctatctccagtctgtctctgtgtactggtagaggctgggaggagtagggggcagcctgttccatttctgatagtgcccttgctcttctgtctgtcatcttgcaggatgcccgagggccagatgggcttagctaggccaaagtaacagactcaagagttattgtacattactgaccacgctcatttgtccaaaagttagaacatctggctgcaccagg

SEQ ID NO: 18924 - protein, 1064 aa, Homo sapiens
MSDEERIQLMMMVKEKMITIEEALARLKEYEAQHRQSAALDPADWPDGSYPTFDGSSNCNSREQSDDETEESVKFKRLHKLVNSTRRVRKKLIRVEEMKKPSTEGGEEHVFENSPVLDERSALYSGVHKKPLFFDGSPEKPPEDDSDSLTTSPSSSSLDTWGAGRKLVKTFSKGESRGLIKPPKKMGTFFSYPEEEKAQKVSRSLTEGEMKKGLGSLSHGRTCSFGGFDLTNRSLHVGSNNSDPMGKEGDFVYKEVIKSPTASRISLGKKVKSVKETMRKRMSKKYSSSVSEQDSGLDGMPGSPPPSQPDPEHLDKPKLKAGGSVESLRSSLSGQSSMSGQTVSTTDSSTSNRESVKSEDGDDEEPPYRGPFCGRARVHTDFTPSPYDTDSLKLKKGDIIDIISKPPMGTWMGLLNNKVGTFKFIYVDVLSEDEEKPKRPTRRRRKGRPPQPKSVEDLLDRINLKEHMPTFLFNGYEDLDTFKLLEEEDLDELNIRDPEHRAVLLTAVELLQEYDSNSDQSGSQEKLLVDSQGLSGCSPRDSGCYESSENLENGKTRKASLLSAKSSAEPSLKSFSRNQLGNYPTLPLMKSGDALKQGQEEGRLGGGLAPDTSKSCDPPGVTGLNKNRRSLPVSICRSCETLEGPQTVDTWPRSHSLDDLQVEPGAEQDVPTEVTEPPPQIVPEVPQKTTASSTKAQPLEQDSAVDNALLLTQSKRFSEPQKLTTKKLEGSIAASGRGLSPPQCLPRNYDAQPPGAKHGLARTPLEGHRKGHEFEGTHHPLGTKEGVDAEQRMQPKIPSQPPPVPAKKSRERLANGLHPVPMGPSGALPSPDAPCLPVKRGSPASPTSPSDCPPALAPRPLSGQAPGSPPSTRPPPWLSELPENTSLQEHGVKLGPALTRKVSCARGVDLETLTENKLHAEGIDLTEEPYSDKHGRCGIPEALVQRYAEDLDQPERDVAANMDQIRVKQLRKQRRMAIPSGGLTEICRKPVSPGCISSVSDWLISIGLPMYAGTLSTAGFSTLSQVPSLSHTCLQEAGITEERHIRKLLSAARLFKLPPGPEAM

SEQ ID NO: 18925 - DNA, 2076 bp, Homo sapiens
  CDS (38)..(952)
agagcgacgcggaaccccgggcgcctgggtccccagcatgatcctcggcagcctgagccgggcagggcccctgcctctgctacggcagcccccgatcatgcagcccccactggacctcaagcagatcctgcccttcccactcgagccagcccctacccttggcctcttcagcaactacagcaccatggaccctgtgcagaaggctgtgctctcccacacttttgggggacccttgctcaagaccaagcgacccgtcatttcctgtaatatctgtcaaatccgcttcaattctcagagccaggctgaggcgcactacaaaggtaatcgccacgcccgacgagtcaaaggcattgaggctgccaagaccagaggcagggagcctggcgtccgagaacctggagacccagctcccccaggcagcaccccaacaaatggggatggtgtagcaccccgtccaggtactaagcacaagacaattctggaggcccgaagtgggctcgggcccatcaaagcttaccctcggctggggcctcccaccccgggggaaccagaggctcctgcccaggaccgaactttccactgtgagatctgcaatgtcaaggtcaactcggaggtccaactgaaacagcacatctccagccggcggcaccgagacggcgtggccgggaagcccaacccactactgagccgtcacaagaagtctaggggcgccggggagctggcgggcacgctgactttctccaaggagctgcccaagtccctggcgggcggcctgctccccagccccctggcggtggctgcagtgatggcagcggcagcaggctcgccgctgtccctgcgcccggctccagccgcacctcttctccagggaccgccgatcactcaccctctgcttcacccggcccccggacccatccgaactgcgcacggacccatcctcttctccccgtactgacctcaaccctgaacccctcccattcaactccccacctccagccgggacccaggcgtccggactcccagcccgcccctcctcccggcactccctaaatgatctctccttccccccccccaccccgagatacggggttccaggaaaggggaggggtagcgggggaggggggcttcagaagggggggaacaccccagatctcagggaaccccgccccctgcctttccctctcccctagaaaagggggggccgtctcacccccgagcccccttggagacaccccccctcccaaaagccatgtccatccagcccttccccccaaacctagcacaaaacggggttcacaagccatggtcggggtccgggggggacagaaatggattttcttggcaataagcggactctgggactccggctccctaccccaaactgaagcgcttccgtgaacacccccgtcctccgtagggggaggggagcaggcgggatcctgggtccctcataagcactttggttttaccgcctgcaacctcactgtgcccgccccgcaccatgccctagccccaggtctagccgggcccattgcagggggcagcacttgggggcatctccggcacttgggtgggaccaaggagatgccaccatagacctttccctcgccttcttcctccctagtccgggttccattcttttcaccagcacccatcgcccaaggggtaccgaggggggcaaggggtgtccagtccaagcccacccccgcctcgccttccgcaaaactgtgagcaaaaagcaatagaagcctcgcccccgcccttccccttcgcaggattcgccgagtctgtagcctccccgattcaagttcctagacctcatggctgtcccctcccaccagtcacctccactgcacaactcgggcgggggtgtgacacctctcccccacccccgactccgtggtttccgtatcgtcaacccttcagccgccgacccgggaggggtctggcctacactggtcttccccttcccatcaactctttctgcttgacaatgtagcaacccaggccccccacccacggccctcccctttttcctctccctgacaataaagtctgaatttgttctgccctccg

SEQ ID NO: 18926 - protein, 305 aa, Homo sapiens
MILGSLSRAGPLPLLRQPPIMQPPLDLKQILPFPLEPAPTLGLFSNYSTMDPVQKAVLSHTFGGPLLKTKRPVISCNICQIRFNSQSQAEAHYKGNRHARRVKGIEAAKTRGREPGVREPGDPAPPGSTPTNGDGVAPRPGTKHKTILEARSGLGPIKAYPRLGPPTPGEPEAPAQDRTFHCEICNVKVNSEVQLKQHISSRRHRDGVAGKPNPLLSRHKKSRGAGELAGTLTFSKELPKSLAGGLLPSPLAVAAVMAAAAGSPLSLRPAPAAPLLQGPPITHPLLHPAPGPIRTAHGPILFSPY

SEQ ID NO: 18927 - DNA, 4171 bp, Homo sapiens
aacccatttacaaaatggatcactggccagactcctcactagccgtgtctatgagagagtgcttgcccatccccgaggtagaagaacagcaccctgaggtgccgctgccccagccggcctggtgctgacaggctggaagaagtgagttgccctctgtagagacccccagagcagatgtgagaagacggccctagtgggagtgccatctgacaagggtcggggagctttttatggacaagggatgccactaaaaattagggatcctctgttttatcctggactgctagctccttttaaataataagtcttatcgagttctttttttttgaggcagagtttcactttatcatccatgctggagtgcagtggcgcaatctcggctcactgcaacctctgcctcctggattccagcgattctcctccctcagcctcctgagtagccgggactacaggtgcctgccaccacgcctggctaatttttgtatttttagtagagatggggtttcaccatgttggccagggtagtctcaaactcctgacctcaggtgatccgcccacctcagcctcccaaatttctgggattacaggcatgagcctctaggcccagccagagtttcattgagttttaatcaaagactgtcttgtgatctgtgattaatccagactaggattcagtaggcaaaagagcagagggccacaaggggagtaccttgtcactgtccatttctccccatcctccaaagcccaaggcacccactcatctactttgtgtccctatggatttgcctattctggacatttcctagaaatggaaccatatggtatgtggccattcgtgtctggcttctttcacttagagaatgtttgcagggttcatccctgttgcagcacacattagtactgcattccttttttagggctgcataatattctatcatcctttgatgtttatttcagcattttctacacttgtacagcaaacacaaacacacaaatgacgcccctgacttctgtatctgcagtcatccttttccctcacatagctgcccagctttgcccctggtttctttctgatattgactcgatgtcacttcaccaacaccttccctggctaccttgttaacagtggcaaaccctgtcctatccttccctggttcccatttgtgcttcaaacctgttatcttctaacttactgtatgtaccacgtagttttcttatttatttcttatttatttgcccacctctcccttcataagaatgtgcaggatacactgctgtatcctcagtgcctgacacagtgccaggtccatggtagctactcaacacgtggttgttgaatggataaaagttgccggagcagaatatctaatcatttttgcgacccactgctaatttcacagactcctccttatgtctgtggatagtggcctcattgattgatgctttaagaacataactggggccaggtgcagtagctcatgcctgtaatcccaacactttgggaggctgaggtgggcggatcgcctgaagtcaggagtttgagaccagtctggccaacatagtgaaaccccgtctctactaaaaatacaaaaattagctgggcgtgctggcgcgcacctgtagtctgagctactcaggaggctgaggcaggagaattgcttaaacccaggaggcggaggttgcagtgagccaagatcaccccactgcaccacagcctgggcgacacagcaagactctgtctcaaaaaagaatataactcatccaaggaagggttgcagagagctccacgtagagagcaagatagttgggaggagaatggaggagagggactggctttttacagcttaggtttgctgatgaaaaaatgaaaagcataaaaattgctcccatctgggctctcctttgattttatttttgtccatagcaccaaaagaacacagagtaatgaggatatcttgagtgaattgctggagtactgcagacccttgaataattctggttaatctagacttctttgctttcttctaaggatctgttcagttgggaaaccctgcttgtcgacttctggtaacctctttgtcttggccagttttaacagcttgtttctgctgaaccagccaatacttaggaagctgtgtaaggctttttttccccctccttcttcttaatgagtttgattcagaggggaagcccaggctgaactgaccttccggaaaatgtaaacctgtttaacaccaaaccttacacagccagaacatgctgtgcccaactctgcctgcccgccttgggctgtgaatcggcacctgcaagtagggctcaagggtgttacagtcggggtcctacctgcctggggtcattcttgaccacctcaagcagacagagacaatttctaggcaacatgatttgtaaagatctgacctctaggttgggagtaggcttccagtttgagaccatgagctgctggaatcgtagacttccccagttcaccttggaagagtagagttcagttctaacagagctgccagaaagaagggctacggctcctcggctgtggctcttaccattgtccctccttgagctgactctaactgccatttccctattatcgcatcccttgcagcttagaaatgtatttttaacaatatatctgggttcagccactggaggttcctcacatggtggaaatagcatggagtcgagcagacagaggagggctcaagtgtcacctcccaccatgtggcgtctgtgtgaccttgagaaagtgacttaacctctctgaacttcagttgtcataatagctaatatctcaaaaagctcttcattcattcattcactcactcaacagacaactattgagtgtctaatatgcccccaggtacatgctaggtgccaggaaaacatactcaaggaaatttgagtctggttgaggaagacattagagcataaaagccattacggcaccacatgatcattgctttggcagaggtatgtgtatgaatatctgggagaactggcccagaccagggctgggaattttgggaggcttgggatagccctggtgaaaagaaagttgtttaaggcaggctgcagagtagacacctcagcttcctcctctgcttccgcccctcctcttccccacaattcagtttccccaagtcaatctgcacactgcagaagtcctctgggggaaagagcagagctctaaataggaccagccctcctggaaagacagaaagtctagatctgaagtcctcacttctttctggaaggaaacctcgcagagcagataccaaattgctcccgcaagaggatccgtagagagaaaggccccagctgcagagaccgtggcccagccgcagccccctgcatgtctcgggtcaagcggagaagtcaggccctccaagtggaaagtccaggctggagcggggcaggcccaccgcctcctatctctgctggctgccgccacaattgcagagcagctggcgagaccgcaagcgttccttctcccagcagcagcctgacttgaaaagcaaaccacaaacccctggcctgatgcctgctcacccgcctcactccctggcaccttccaaccaggggagcctggagctcacgcgtgaagttgcagcagcaagcaatctgcctcgcttctggtgcccaccgaaaccaaggtctgccagacagcagcgctgggacctctcccctccccagcaggatgggccggctctggaagcacgaggtgttccaaagtgcaaacaagctgctgttaaataattattcccaaacgccaaagcccttgctggtttgcttgcttgcttttttctttttttgcctcgcacagatatcgctagggcagagtattgacatttcgttttctttttgttatgggtgataaagcacggtgtttcttgtgagtgtatgcctgtatttccctgcagagctggttgccagtccattttcttctatcccatccccatcttccgtacagtccgatgacctccacagaggagatcgggatgtctctatgatgccacgtctctggatagagctggagcaggcataagagaaatgccaactgccaaccccccccgccacccctggaaaaaaaaaaaaaaaaacaagcacaacaggtttctccctaaagcctgtcctccaaagtagtcaaaccctgatt

SEQ ID NO: 18928 - DNA, 2345 bp, Homo sapiens
  CDS (206)..(2044)
ggaagtggatcgtgcggagcaagcatcacaccatggcgtatgagtgttcctctgtgtagactcaacctgcgcctcgccgtcccccattcgcacacccgatgcccgggggtcgctacggacttaaaatctccgcaccgcaccctccacctcagatatctcttgtaaatgtgtaaacacggatttgccaccaaaggggaagaacaatatgggagaagcgttctacacggtgaagttggagagacttgaaagctgtgacactgcaggcttgtccttccaggaagttcagaaaaatacatacgactttgagtgtcagtggaaagatgatgaaggaaattataaaacagtacttatgttgcaaaaagaaaatctccctggtagaagagctcaacgtgatagaagggctgcaggaaacaggcatattgaaaatcagcttggagtaagctttcagtcacatctccctgaactgcagcaatttcaacgtgaagggaaaatttatgaatacaatcaagttgagaagtctcctaataatcgaggaaaacattataaatgtgatgaatgtggcaaggtcttcagtcaaaactcacggctaacaagtcataagagaattcatactggagagaagccttaccagtgtaataagtgtggcaaagcctttactgttcgttcaaacctaacaatccatcaggtcatccatactggagaaaaaccttacaaatgtaatgaatgtggaaaggtcttcagtcaaccttcaaaccttgcaggtcatcagagaattcatactggagagaaaccttacaagtgtaatgagtgtggcaaagcctttagagcacattcaaaactaactacacatcaggtcatccatactggagaaaaaccttacaaatgtaaggaatgtggcaagtgcttcactcaaaattcacaccttgcaagtcatcgaagaattcatactggggagaagccttacaagtgtaatgagtgtggcaaagcctttagtgttcgctcaagcctgactacccatcagacaatccacactggagaaaaaccttacaaatgtaatgaatgtggcaaggtcttcaggcacaattcataccttgcaaagcatcggcgaattcatactggtgagaaaccttacaagtgtaatgagtgtgggaaagccttcagtatgcattcaaacttaactaagcatcagatcatccataccggagaaaagcctttcaaatgtaatgaatgcgtcaaggttttcactcagtattcacacttagcaaatcatcgaagaattcatactggagagaaaccttacaggtgtgatgagtgtggcaaagcctttagtgtgcgatcaagcctaactacccatcaggcaattcatactggagaaaagccttacaaatgtaatgactgcggtaaggtcttcacacaaaattcacaccttgcaagtcatcggggaattcattctggagagaaaccttacaagtgtgatgaatgtggtaaagccttcagtcaaacatcacaacttgcaaggcattggagagttcatactggagaaaaaccttacaagtgtaatgagtgtggcaaagcctttagtgttcattcaagcctaactatacatcagacaatacatactggacaaaaaccatacaaatgtaatgattgcggcaaggtcttcagacacaattcgtaccttgcaattcatcagagaattcacactggtgagaaaccttataagtgtaatgagtgcggcaaagcatttagtgtacattcaaacctagctacccatcaggtcatccatactggagaaaaaccttacaaatgtaacgaatgtggcaaggtcttcactcaaaactcacatcttgcaaatcatagaagaattcacactggagaaaaaccttataggtgtaatgagtgtgggaaagccttcagtgttcgttcaaccctaactacccatatggcaatccatactggagacaaaccttacaaatgtaaccaatgtggcaaggtctttactcaaaattcaaaccttgcaaaacatcgaagaattcatagtggatagaaaccttacaaaggacgccgggcgtggtggctcacgcctgtaatcccagcactttgggaggccgaggcagggggatcacctgaggtctcgagttcgagaccaggctggccaacacggtgaaacgctgtctctactaaaaatacaaaaattagctgggtgtggtggtgcacgcctgtaatcccagctactcgggaggctgaggcaggagaatcacttgaacctgggaggcggaggttgcagtgagcgagatcatgccattgcactccagcctgggcaacaagagtgaaactccatctcc

SEQ ID NO: 18929 - protein, 613 aa, Homo sapiens
MGEAFYTVKLERLESCDTAGLSFQEVQKNTYDFECQWKDDEGNYKTVLMLQKENLPGRRAQRDRRAAGNRHIENQLGVSFQSHLPELQQFQREGKIYEYNQVEKSPNNRGKHYKCDECGKVFSQNSRLTSHKRIHTGEKPYQCNKCGKAFTVRSNLTIHQVIHTGEKPYKCNECGKVFSQPSNLAGHQRIHTGEKPYKCNECGKAFRAHSKLTTHQVIHTGEKPYKCKECGKCFTQNSHLASHRRIHTGEKPYKCNECGKAFSVRSSLTTHQTIHTGEKPYKCNECGKVFRHNSYLAKHRRIHTGEKPYKCNECGKAFSMHSNLTKHQIIHTGEKPFKCNECVKVFTQYSHLANHRRIHTGEKPYRCDECGKAFSVRSSLTTHQAIHTGEKPYKCNDCGKVFTQNSHLASHRGIHSGEKPYKCDECGKAFSQTSQLARHWRVHTGEKPYKCNECGKAFSVHSSLTIHQTIHTGQKPYKCNDCGKVFRHNSYLAIHQRIHTGEKPYKCNECGKAFSVHSNLATHQVIHTGEKPYKCNECGKVFTQNSHLANHRRIHTGEKPYRCNECGKAFSVRSTLTTHMAIHTGDKPYKCNQCGKVFTQNSNLAKHRRIHSG

SEQ ID NO: 18930 - DNA, 2273 bp, Homo sapiens
  CDS (304)..(888)
aagacagtctcgatctctgtcctgtggtatacagcatccagggaagtgcccagggaccagggcaggcagaggtcttcctgcctttaccccacctgggcccagttcctgcgcaggggcttggccagtcctggtcagctttccctctgatgactgcaggaagagagtcagacgcggaactcccagggtgcagaggcctgcggggtctgaagggcctcctccctctccagtgtggtgactgggctgaggagatgctgggactgagagtgtcatggtggagcctccgtccctgctcatcctctccgcatgttgcttctgctcccgatggctctctctgaaatgcagcacaacctcctaggccaatggaagaaggcccagagctggctccctgcctggaagcacgaggagacccgcacaggcatcctgagaaggcgtggagagcaggctgccttcatggggggagtgccagggcctgggcacccacacccgctgacccaagagggcccgggcacctgcgtgctggcctcttcactgaccttcgctctgtctgctctctttgtgtctctctctgacctccagaggcctcctttctctctgccaggaacagtagcccccctgcaaggccctccttttcctccagcccgcagcctgcggcctctccggttctgctccacagcccggctgccacacactcgcctctctctccaggccccccgggttccctccgcctctcttgctgcctgttctctccttttgcaggttgcgtttattggcttatctctgggggttggtgctctcccttgtttccatggaaactgcctggccccaggaggcccaagcagctttgagctccaagggcaggaccatgcaggccatcgctgccctgccgcttagccacagggcacgatttctgactcggtttattagagacatagtgtggcagtctctagaccccacagtcgggctggcatctggggacaggaccaacacccccacaccccagaggcgaactgtggtgagtgtaaagagcccctctccaggggaagacagccggccagagtgcggtgtgctgtgctggagagcacagccccaggcgtgacaaacacctcggcctcttagaagttgtcccttatctggacaggaagtctggaggctgaaacagagactcccaccttcccagagtctcctgggcagtgccacacagatgccatatgctggccccgtggccacactccagcactcagcccccttgcccacctcactcctgagttagcacactttccaggtgtcagcaggtgtgatcaggggctcagagccagggtcctgtgagagcccaggggtctttggttgcacctcctgcgtgcacttcctgacagcgcccacctcactgccacccagagctcagacccaagggagggtggagaggggctgagggacaggcctggagtaggggtgtatgcactgcaggctgagatgagcaattgaggggcaagtgtccagcaggagggagaaactgggaacagagtccttgtcactccaggggatgttgctgctcactcagcactcactcagggctctgggagccaggcctagctctcagggcagagggtgtggcagggaagtgagatgatcacactcagagcccagtgagaggcagtgaggaaaaccaccagcgagaccagtgtggtggctcacacctgtaatcccagcactttgggaagtcaaggcaggtggatcccttgagctcaggagttcaagaccagcctgggcaacatagcaagaccccatctctacaaaaaatacaaaaactagccaggcagggctgggcgcggtggctcacgcctgtaatcccagcactttgggaggccgaggcgggcggatctcgaggtcaggagattgagaccatcccggctaacacggtgaaaccccgtctctactaaaaatacaaaaaaaattagctgggcatggtggcaggtgcctgtagtcccagctactcgggaggctgaggcagaagaatggcgtgaacttgggaggtggagcttacagtgagccgagatcacaccactgcactccagcctgggggacagagcgagactccgtctcaaaaaaaaaaaaaaaaaaactagccaggcgggcatggtggtggcacccatctgtagtcccagctacttgggaggctgaggtgggaggatcgcctgagcctgagggggatgttgccgtgagccaagagcttgtgactggactccagcctgggcaacagagcaagaccctgtctc

SEQ ID NO: 18931 - protein, 195 aa, Homo sapiens
MLLLLPMALSEMQHNLLGQWKKAQSWLPAWKHEETRTGILRRRGEQAAFMGGVPGPGHPHPLTQEGPGTCVLASSLTFALSALFVSLSDLQRPPFSLPGTVAPLQGPPFPPARSLRPLRFCSTARLPHTRLSLQAPRVPSASLAACSLLLQVAFIGLSLGVGALPCFHGNCLAPGGPSSFELQGQDHAGHRCPAA

SEQ ID NO: 18932 - DNA, 2422 bp, Homo sapiens
  CDS (54)..(785)
atttaaaggagtcgggtctctaactgttgatctgtttttttcccttctgagcaatggagcttaccatctttatcctgagactggccatttacatcctgacatttcccttgtacctgctgaactttctgggcttgtggagctggatatgcaaaaaatggttcccctacctcttggtgaggttcactgtgatatacaacgaacagatggcaagcaagaagcgggagctcttcagtaacctgcaggagtttgcgggcccctccgggaaactctccctgctggaagtgggctgtggcacgggggccaacttcaagttctacccacctgggtgcagggtgacctgtattgaccccaaccccaactttgagaagtttttgatcaagagcattgcagagaaccgacacctgcagtttgagcgctttgtggtagctgccggggagaacatgcaccaggtggctgatggctctgtggatgtggtggtctgcaccctggtgctgtgctctgtgaagaaccaggagcggattctccgcgaggtgtgcagagtgctgagaccgggaggggctttctatttcatggagcatgtggcagctgagtgttcgacttggaattacttctggcaacaagtcctggatcctgcctggcaccttctgtttgatgggtgcaacctgaccagagagagctggaaggccctggagcgggccagcttctctaagctgaagctgcagcacatccaggccccactgtcctgggagttggtgcgccctcatatctatggatatgctgtgaaatagtgtgagctggcagttaagagctgaatggctcaaagaatttaaagcttcagttttacatttaaaatgctaagtgggagaagagaaaccttttttttggggggcggtttttttggtttgttgttggtttttttttttttttttggcgggaagaaagagttttgctcttgttgcccaggctggagtgcagtgacgtgatctccgctcactgcaacctccacctcgcgggtttaggcgattcttctgcctcagcctccctagtagctgggattgcaggtgcccaccaccatgcccggctaatttgtatttttagttgagacagggtttcgctacgttggccaggctggtcttgaactcctgatctcaggcaatccacccacctcggcctcccagagtgctgggatgacaggcgtgagcaaccgcacccagcttaaggtttttttgttttgttttgagacggagttttcgctcttgttgcccaggctggagtgcaatgctgtgatctcggcttaccacaacctccacctcccgggttcaagtgattcacctgcctcagcctcctgagtagctggtattacaggcatgcgtcaccacgccggctaattttgtacttttagtagagatggtgtttccccacgttggtcagcctggccaacatggcaaaaccctactaaagatacaaaaaaaaaaaaaaattagccgggcgtggtggtgggtgcctgtagtcccaggtacttggaaggctgaggcaggagaatctcttgaacccagaaggcgaaggttgcggtgagccgagatcatgccattgtactctagcctgggtgacaagagcaagactccgtctcaaaaaaaaaaaaaaaaaaaaaagaagtagagacagggagacggggtctcactgtgttgcctaggccggtcttgaactcctgggctcaagtgattctcccaccttgacctcctaaattgttgggattacaggtgtgagacagtgcacctggccgaaatagctcaagtttctgaaaaacaaatctgaatctatttgttattcttagcgtcactggtctggctttcagaattaacatacaaggttgccacacctagttctgcccagctttatgtctttattccagtattccaccaaagtttgttttcctgcattccagttctcaagtcttaagataaagattgtacttgacagtttagtatatccataaaactatttgaggtggttaaggttcttgggttcattttccttaatactttgctgaatattgtagattgtaggcaatgaaaaagtctactaaattaggaaaaccttgaataattaggtatcctaggtaagagcccctaaacatcaagcaatctgtgagtctgtaaagaaataaatattttttggattattcttatctaattccacccctgttggaagatgatttctttgttctttgcaactatggaagctgtgaaaatcatcacaagtgcctctgaaagcgagtgttaggttggttagagggtttaatattttctgcaatggtttgtaggaattttaataaatgtagtatattttctgagatgattttgtaaaagtactattttaaatatcaaatcaaccaataaattcacatttgtgttaggaacag

SEQ ID NO: 18933 - protein, 244 aa, Homo sapiens
MELTIFILRLAIYILTFPLYLLNFLGLWSWICKKWFPYLLVRFTVIYNEQMASKKRELFSNLQEFAGPSGKLSLLEVGCGTGANFKFYPPGCRVTCIDPNPNFEKFLIKSIAENRHLQFERFVVAAGENMHQVADGSVDVVVCTLVLCSVKNQERILREVCRVLRPGGAFYFMEHVAAECSTWNYFWQQVLDPAWHLLFDGCNLTRESWKALERASFSKLKLQHIQAPLSWELVRPHIYGYAVK

SEQ ID NO: 18934 - DNA, 2260 bp, Homo sapiens
  CDS (122)..(733)
tccccagtgcctaactctgctgtctgctatatttcagcctttcatccgctgtagtttacaatgcagggatctggttgatgaagcaaagaagtttcatctgaggcctgaacttcggagtcagatgcagggacccaggacaagggctcgcctaggagccaatgaagtgcttttggtggttgggggctttggaagccagcagtctcccattgatgtggtagagaaatatgaccccaagactcaggagtggagctttttgccaagcatcactcgtaagagacgttatgtggcctcagtgtcccttcatgaccggatctacgtcattggtggctatgatggccgttcccgccttagttcagtggaatgtctagactacacagcagatgaggatggggtctggtattctgtggcccctatgaatgtccgacgaggtcttgctggagccaccaccctgggagatatgatctatgtctctggaggctttgatggaagcaggcgtcacaccagtatggagcgctatgatccaaacattgaccagtggagcatgctgggagatatgcagacagcccgggaaggtgccggactcgtagtggccagtggagtgatctactgtctaggaggatatgacggcttgaatatcttaaattcagttgagaaatacgaccctcatacaggacattggactaatgttacaccaatggccaccaagcgttctgatatgatggtaattccctgctaagtagcattgaatgttatgaccctatcatcgacagctgggaagtcgtgacatccatgggaacccagcgctgtgatgctggtgtttgtgttctccgcgagaagtgaccattgttggagcaccatccagagctagtgaccagtccagtggacagttagtgggagaatcaaaaatcctttccagaatgtctgtttctcactatgtgcaccgggtgattacaggcaccagtgcagtgatgattgtacttatttgacacatactccccgtcgtcctggttcttgttcctgagaagggtgggtaacagatattccaggaaaaagaatgcacattgaatggatgtgagagaccacattgcctctcccactgctttggggagcactttcctgtcatttctaacttaccacatgcttggtgtactatatgtatgttgtgcctcatatgttgcaaagaactaaggtgagtatagcctactagatatgggcaatatccagcctagatgattggaaagataccagtttaagtaaacttggtaaaatccaagtcttttttttttttttttccaggaacaactacattttctcatatacaggtagctaggggcaacacggttccattctagagggaaacaaaagggagagccccacaaaactttggggacaagggagagagagactcatctgacacttcttttggaggtcaggatttgtatatcagaattgaagttagaattaagtgaattaaactgaatttgattgtgagtgaacctagaacagcactgaagtattacataacctggaagactgagaagggtatattatttgaaggatctttttatttccccgaggtctttcgcactggagacagcataaaagagtgaacaaatgttgggatgagagaagatgacatcaatgtgggagttcagtataactggggataaactagaagaacctgtgattttacagtcatcttattacctgccagggctcatctagccatggcaatgtttgccttgaatgggggtgaaagcctttctttgttggatcaaatactactacactattacacttccacactatttatttggggatgggctgggagtgacagtagcctagtagttcagctacctgattactgccccattcttttagaagcacatgtctgccaaggagtggtttgtactgctgtgtttggtacatctagtcttttttctgctataagttttccttacctgtcctttagtgtagattttattcatcacaggacagaataatcaaggacaaccaaaatccttttgttagtttcagtacctcagctatcaacatttctgagctaccattcaatgttcctctgtgtcatggagtgaaattcttgttttgtgggtattaggagtgtgggaatgtgataacctaaacaacctttgctctgaaattccatttttccctctttccctgagttgtattgacctacagagttaatttcctttgtatttttttaagaaaatattaaaaatcaacggtctcaaatgcc

SEQ ID NO: 18935 - protein, 204 aa, Homo sapiens
MQGPRTRARLGANEVLLVVGGFGSQQSPIDVVEKYDPKTQEWSFLPSITRKRRYVASVSLHDRIYVIGGYDGRSRLSSVECLDYTADEDGVWYSVAPMNVRRGLAGATTLGDMIYVSGGFDGSRRHTSMERYDPNIDQWSMLGDMQTAREGAGLVVASGVIYCLGGYDGLNILNSVEKYDPHTGHWTNVTPMATKRSDMMVIPC

SEQ ID NO: 18936 - DNA, 1852 bp, Homo sapiens
  CDS (206)..(619)
tgcaacatgaggacataggactctttaattccaaaggctcttccaacccagagaacccatctgcccccatgaccttctcccagagcttgagacatggcctgagccccctgctgccataggacttggggcctatctgccattgcaggacctgatttaacagctctcttcttccaatactgggcagtagagtttcggaaactgacaaatgtgtggtctcttcagtgcccagtgtgtaacctggcatggtttgggtgtgctaggagtttgtgaaatgaatgttttcaagacgcaaacgctgctatgcccatcaggtgtgcacagcaggcctgaggatcatgatgagactccctttttatgcagcaaagcacaaagtgtgacagtcgtggccttcctggtggccagacttctagcaactttagccacccaccaaatgacatcacatacagaaggcctcagaaagggaggaggtcgtaaggacacacagctgatgaagggtcagtgctcagctatcaaggtcatcttctggcctggttgcctcccacagcccaggatgcattcaaggctgcacatcaggagcataaataagggtggtcagctcaggcccactggctgcaacaagtagccactgacagggagtctggggccatttggtgcagaacaacccccaacccagtggccatcttcacaactgcagcacagtgctggccctaatgccaggtgagcgtgcaaagtcctgtttctttgtctttacatagggaccgggcgatgcgctttagagaaattccctattatttcacaggaaaggaggctgtgaaaaggagagggcaggttttggagccaagtcgacctggcatcaggtcctggctgccttttttttttttttttttttttaaagacatacatggtcttgctttgtcgcccaggctggagtgcagtggcagtgtcatggctcactgcagcctcaacctgctgggctcaagcaatcctcccacctcagcccgagttgctgggatgacaggcacacgccaccatacccagctaatttttatattttttatagaaaccaggtctcactatgttgcccaggccggtcttaaactttgcccaggccagtcttgaactcctgagctcaagcaatcctcctgcctcagcctcccaaagtgctaggattacaggcgtgagccacttacccggcctctgcctcttgttaatttgaccacatcatgtacctgctgtgcccgttccttcctccgtagaagagggtgctggtcctgcccttttgaggcctccatgagggccaaatgtgccatgggacacttagtgccatgcctgcgcagacctgtggaataaacagcaattctgagcaggctcattttaaagggacttgcaaatttgggcgttccttgtgtgccttcctcataaaacccactcctcccagaatatgcttagaggtgctgctgtatttacctgagagctatgcttttcatcgaaaacctaaacgtgatcatctcttggatgaggtgtggccctgcaccctcgcctgctcgtggaaggagtctgggccagcagtgacccatgcgctagggtctctgctgaggaagtggcaggtgtgtggccctgccctggccccgtagtgagtgtggggcccacctgtgccctcatgggcagctgaagggggagctttctaccccaggttcctttccttactgaaaagtcttgagcaaacagttgccgctctccaccccctgctttttaaaaaaaattttttctcacgtaagaaaatgttatctgtgtgctggggaaaattttgaaaataacaaaaaccagaatacaaacacccatgatcaatcac

SEQ ID NO: 18937 - protein, 138 aa, Homo sapiens
MCGLFSAQCVTWHGLGVLGVCEMNVFKTQTLLCPSGVHSRPEDHDETPFLCSKAQSVTVVAFLVARLLATLATHQMTSHTEGLRKGGGRKDTQLMKGQCSAIKVIFWPGCLPQPRMHSRLHIRSINKGGQLRPTGCNK

SEQ ID NO: 18938 - DNA, 2520 bp, Homo sapiens
  CDS (39)..(2081)
tcaatgaagcccaagaagctgcatcaagtgataatattatggtccagtaccatgcattgggagtcctgtatcaccttagaaagaatgatcgacttgctgtttccaagatgttgaataagtttactaaatctggtctcaagtcacagtttgcttactgcatgctgatccgaattgccagtcgcttactaaaagaaactgaggatggccatgaaagtccactgtttgatttcattgagagctgcttgcgaaataaacatgaaatggttatttatgaagctgcttcagctatcatccatcttcctaactgcactgcaagagagttggcacctgctgtttcagttcttcagcttttctgtagttctcctaagccagccttgagatatgcagctgtgaggaccttgaacaaggtggcaatgaagcacccctctgctgttactgcctgcaatctggacttagaaaacttaatcacagactcaaacagaagcattgctaccttagccattactacactcctcaaaacaggaagtgagagcagtgtggaccggctcatgaagcagatatcttcttttgtgtctgaaatctcagatgagttcaaggtggtggttgtacaggcaattagtgctctctgtcagaaataccctcgaaagcacagtgtcatgatgactttcctctccaacatgctccgagatgatggaggctttgagtacaagcgggccattgtggactgtataatcagcattgtggaagagaaccctgagagtaaagaagcaggcctagcccacctttgtgaattcattgaggactgtgaacacactgttctggctactaagattctacacttgttgggcaaagagggccctagaacgcctgtcccctccaaatatatccgttttatttttaatagggttgtcctggagaatgaggctgtcagagctgctgctgtgagtgctttggctaaatttggggctcagaatgagagtcttctcccaagcatccttgtactcttacagaggtgtatgatggatactgatgacgaggtacgagacagagctaccttctatctgaatgtgctgcagcagaggcagatggcactaaatgccacatatatctttaatggtttgacagtctctgtaccagggatgggaaaagccttacaccagtacacgttggagccttcagaaaaaccgtttgacatgaaatcaattcctcttgctatggctcctgtctttgaacagaaagcagaaatcacacttgtggctactaagccagagaagttggctccttccaggcaagacattttccaagaacaattggctgccattcctgagtttctgaatataggacccttgttcaagtcttctgagcctgttcaacttacagaagcagagacagaatattttgttcgatgtatcaagcacatgtttaccaatcacatcgtgttccagtttgactgcaccaacactctcaatgaccagctgctggaaaaagtgacagtgcagatggagccatcagattcctatgaagtgctgtcttgtatcccagcccccagccttccttataaccaaccaggaatatgttacactcttgttcgtttgcctgatgatgaccctacagcagttgcaggctcctttagctgcaccatgaagtttacagtccgggactgtgaccctaacactggagttccagatgaggatgggtatgatgatgagtatgtgctggaagatctcgaagtgactgtgtctgaccatattcagaaagtactgaagcctaactttgctgctgcttgggaagaggtgggagatgcctttgagaaagaggaaacctttgccctcagttctaccaaaacccttgtagaggctgtcaacaatatcatcacatttctgggcatgcagccatgtgagaggtccgataaagtacctgagaacaagaattcccattcgctctatctggcaggtatattcagaggtggctatgatttattggtgaggtccaggctggccttagccgatggagtgaccatgcaggtgactgtcagaagtaaagagagaacacctgtagatgttatcttagcttctgttggataaatgcttactggacaagaggaaactgatgcacactacatggtcagtgggcttttaggctagtggcatcagtttcccagaatcagacttttgaagatgaacgactttggagaagcaaattaaacatttggccctgagccagcagatcaagcaaatgtctatctttgcgcatgggttgttttttttttttttttctttttattctacttggtcagctttgggacggtagtgcagctttgggtgatcttgaaaatcaaatactatcctatactccagctgcttaacttcattttattctttaatgtgtacctgaaagctcctggcaatgctggaaaatttttatcccagaggggtgggggggaggggggaggggaagccagagtccacttttgtcacaattcatttttattaatagaaaataaacacttattccagtttc

SEQ ID NO: 18939 - protein, 681 aa, Homo sapiens [sequence omitted]

SEQ ID NO: 18940 - DNA, 2688 bp, Homo sapiens
atttagcaacaacagtgtgaggctccacttccgttgaatatgagcggctgtcacacccatgagcaagtttccttgatggaagatgctgtttctccggcagaaccaaccctccaggacgaagtttcagaattggctgatggtcgtgagtgcaggtgtccctgttgtaatttgcagggaaattgactgcaggcgatagtgttgacgtccgacgtctgacaacctcctatgtgcatgtctaaatagtcacaatgaagatgaaaataaggatgatggggacggggtccaggagggccactgggaaggcactatccagaaatagtggacagaggtctggcatgtggaaaccttggatctcggtcacagggaggaaggcagctagaaatgggagggaagcttctgggtaggcaccatagtaggggaatgtctaaagacccactgctctgagatgtggtcagagaggtttctgtggactgcagatgaggcctgagccctgcctatgctcaaagccatcagggttgggggtccgcctcctcactgctcctcaacagctgtaaccctttcctgagggccccgacttttcagaataggagcagagagaagcccagacttccttccctggagtgtagacctgtgtgtgggacctgctccaggctgatccctgtccgcacaggtgggtgatgtccttggctgctgccgtcagaggcagccccctgcacagggaggggctgatcctgcctcagctgtgtggccatgtgggggcagcaggggcctgggccatagctgggggaggccagaccctgagggctttgcagggcggccagtgcagtgatgcctggcgcttccagctgagacaggagtccggacagaggtgggcagggtggatggcttcgggcagggaaggcgggtagaggctgcatgtgggggcccctgtctgcctgtccttagggtgtggattaggctctggcttctgtgatggtgcaagaggcaggatggtctccagacaccttcttgcagagtgattttgaccaatgcctttccagcaccttcccctggttatgacagggagctcccaggccaggccacatgaccccacaggtaggctgaccccatggacccactggagactttgagggcagagctcgggcacctttcatcttccttgggtggtcctcatgtcgctgtccgctcatgttcctggtgttctggcatcaccttgtgccggtgggggctgggctcccgtgaggtcctagggcagaaggaggtgcttgcagggcctctcgctgctactgggacatccacaggacctaatgtttatgtggaatctccaggctgccatcgagggctcctgagctcatcctgaggacccagggtccatctgagctggctgtgggctgagatcctggctggggccctgctgtcaacctctcctccaggccctgccttgtccctgctcctgtgctttcctctcttcaggacaaatggtttgtccttatggtcccctttccactaggattttctcatcctcatctgtctatcccagccggatttaaagcagtcacttcagacaggagccacagggagcctgtgagggagtagtgcggtggtggtgagtgtggctgccctggctcccccagctcaccgtggtgctgtccttgacccacgagctgttgagaagggtgcagagcccctggcacagccaaccctgttgcccccagtgccgctgcccagcttcggccatccaggtggtgggtagacagaggagtgaaccccaaaggtgtccatgccccagttctaagccctgtggccaggtgctgtcacacagcaaaggggactttgcaggtggaattagggttagggatctaaggatgggaggggaacttggtttatctgggtgggctcagtgaccccttggaatggctgagggaggcaggagagcctggaaagattcgaagtgtcacagagatggtgccgtcattgctggcttaaagacaaggggccaggagccaacaccagaggccactccacaaccccagcgccagtcagcaaggaagccgggtgtcgctcacacaaccagaaggagctgagtttggcaacaacccaagtgagcctgaagcagattcgccccagagcctccaggcgtgagtggagcccagtccagcgacaccttggtttggcctgtgagactgagaagagagccagccacgccatgctgtgcctggggtccacagagccgggaggtcacacatgtacatcctggaagctgcccaaggtgtggccacttgtagggcagtgagaggaagccgtcgcggggaccatgctgccttctctgggctcacgactgttctggaaaggaccccatggcagacttggcaaggtctccacttcaggggcaaacatctccatcatcagcaactccaaaccccagccacttcctgggagttcaggaactgtgtttagccataatgtcccttggggtttggtgaaaaacaacttcctttttatttgtgggaaaactgtattatattgccttatttatttttaatcatgtacaatattcatgtacaaatgttagagccattcgggtaggattctctctaaattatttattgaagaggctttgtaaatagtgcaccagtgacaggtgctgcctgtttactcgtaccaaaaatgaagacaagccccacaccc

SEQ ID NO: 18941 - DNA, 4708 bp, Homo sapiens
  CDS (38)..(4390)
actgggctctaatttcactttgcaactggtgactgtgatgcttgtcggtggacgtttctatggaatgccaacaattcttcaggaagcaaaatctgctgtccttccagtctctgagaaagctgccaattctcaggtcggatttgaatccactgcttttcaactcatgaacatcactgctggcacaagccacgttatgatttctaggagaggcacatatggagctctctcggttgcctggaccactggatatgctcctgggttagaaattcctgaattcattgttgttggcaacatgaccccaacactggggagcctttcattttcccacggtgaacaaaggaaaggagtttccctgtggacgtttcctagccctggttggccagaggcctttgttcttcacctatcaggagtgcagagcagtgctcctggcggagctcaactccgatcaggtttcattgttgctgaaattgaaccaatgggcgtcttccaattttccactagctcaagaaatatcatagtgtcagaagatacacagatgatcagattacatgtacaaagactatttgggttccacagcgatcttattaaagtttcttatcagaccactgcaggaagcgccaagccactggaagattttgagcctgttcagaatggggaactgttttttcaaaaattccaaactgaggttgattttgaaataaccattattaatgatcagctttctgagatagaagaatttttttacattaaccttacttcagtagaaattaggggattacaaaagtttgatgttaattggagcccacgcctgaatctagatttcagtgttgcagtgattacaatattggataatgatgacctggcaggaatggatatttccttccccgagacaactgtggctgtagcagttgacacaactctcattcctgtagaaactgaatccaccacatacctcagcacaagcaagacgactaccattctgcagccaaccaacgtggttgccattgttactgaggcaactggtgtatctgccatccctgagaaacttgtcacccttcatggcacacctgctgtgtctgaaaagcctgatgtggccactgtaactgccaatgtttccattcatggaacattcagccttgggccatccattgtttatattgaagaggagatgaagaatggcacattcaacactgcagaagttcttatccgaagaactggtgggtttactggcaatgtcagcataacagttaaaactttcggtgaaagatgtgctcagatggaaccaaatgcattgccctttcgtggtatctatgggatttccaacctaacatgggcagttgaagaagaagactttgaagaacaaactcttacccttatattcctagatggagaaagagaacgtaaagtatcagttcaaattttggatgatgatgagcctgaggggcaggaattcttctacgtgtttctcacaaaccctcaagggggagcacagattgtggaggggaaggatgatactggatttgcagcttttgccatggttattattacagggagtgaccttcacaatggcatcataggattcagtgaggagtcccagagtggactagaactcagggaaggagctgttatgagaagattgcaccttattgtcacaagacagccaaacagggcctttgaagatgtcaaggtcttttggcgagtcacacttaacaaaacagtcgtcgtgctccagaaggatggggtaaacctgatggaggaacttcagtctgtgtcagggaccacaacctgtacaatgggtcaaacaaaatgctttatcagcattgaactcaaaccagaaaaggtaccacaggttgaagtgtatttttttgtggaactatatgaagctactgctggagcagcaataaacaacagtgccagattcgcacagattaaaatcttagaaagtgatgaatctcaaagccttgtgtatttttctgtgggttctcggctggcagtggctcacaagaaggccactttaatcagtctgcaggtggccagagattctgggacaggactaatgatgtctgttaactttagtacccaggagttgaggagtgctgaaacaattggtcgtaccatcatatctccagctatttctggaaaggattttgtgataactgaaggcacattggtctttgaacctggccagagaagcactgtattggatgtcatcctaacgccagagacaggatctttaaattcatttcctaaacgcttccagattgtcctttttgacccaaaaggtggtgccagaattgataaagtgtatgggactgccaacatcactcttgtctcagatgcagattcgcaggccatttgggggcttgcagatcagctacatcagcctgtgaatgatgatattctcaacagagtgctccataccatcagcatgaaagtggccacagaaaacacagatgaacaactcagtgccatgatgcatttaatagaaaagataactactgaaggaaaaattcaagctttcagtgttgccagccgaactcttttctatgagattctttgttctcttattaacccaaagcgcaaggacactaggggattcagtcactttgctgaagtgactgagaattttgccttttctctgctgactaatgttacttgcggctctcctggtgaaaaaagcaaaaccatccttgatagttgcccatatttgtcaatattggctcttcactggtatcctcagcaaatcaatggacacaagtttgaaggaaaggaaggagattacattcgaattccagagaggctactggatgcccaggatgcagaaataatggctgggaaaagtacatgtaaattagtccagtttacagagtatagcagccaacagtggtttataagtggaaacaatcttcctaccctaaaaaataaggtattatctttgagtgtgaaaggtcagagttcacaactcctgactaatgacaatgaggttctctacaggatttatgctgctgagcctagaattattcctcagacatctctgtgtctcctttggaatcaggctgctgcaagctggttgtctgacagtcagttttgcaaagtgattgaggaaactgcagactatgtggaatgtgcctgttcacacatgtctgtgtatgctgtctatgctcggactgacaacttgtcttcatacaatgaagccttcttcacttctggatttatatgtatctcaggtctttgcttggctgttctttcccatatcttctgtgccaggtactccatgtttgcagctaaacttccgactcacatgatggcagccagcttaggtacacagattctgtttctggcgtctgcatacgcaagtccccaactcgctgaggagagctgttcagctatggctgctgtcacacattacctgtatctttgccagtttagctggatgctcattcagtctgtgaatttctggtacgtgctggtgatgaatgatgagcacacagagaggcgatatctgctgtttttccttctgagttggggactaccagcttttgtggtgattctcctcatagttattttgaaaggaatctatcatcagagcatgtcacagatctatggactcattcatggtgacctgtgttttattccaaacgtctatgctgctttgttcactgcagctcttgttcctttgacgtgcctcgtggtggtgttcgtggtgttcatccatgcctaccaggtgaagccacagtggaaagcatatgatgatgtcttcagaggaaggacaaatgctgcagaaattccactgattttatatctctttgctctgatttccgtgacatggctttggggaggactacacatggcctacagacacttctggatgttggttctctttgtcattttcaacagtctgcagggactttatgttttcatggtttatttcattttacacaaccaaatgtgttgccctatgaaggccagttacactgtggaaatgaatgggcatcctggacccagcacagcctttttcacgcccgggagtggaatgcctcctgctggaggggaaatcagcaagtccacccagaatctcatcggtgctatggaggaggtgccacctgactgggagagagcatccttccaacagggcagtcaggccagccctgatttaaagccaagtccacaaaatggagccacgttcccgtcctctggaggatatggccaggggtcactgatagccgatgaggagtcccaggagtttgatgatttaatatttgcattaaaaactggtgctggtctcagtgtcagtgataatgaatctggtcaaggcagccaggaggggggcaccttgactgactcccagatcgtggagctcaggaggatacccatcgccgacactcacctgtagcacctcactaaccattcgactgagcacactttcatatttgtatcagcttttgtgctaaaactctctaagtacatccacctgtgtaataggaacctgtgaattgtactggatgattaatacaaacgtgattgttgtatttggagtataaattactgattgtatgtgacctgaaaattcactgctataagaaaggtggagtcagtttgtatcagttaataggatgttcatattccaaggatattagttgtttttttaatcatcctatatggctaacattgtttaatgaaagtaataatcaataaagcaatagaatct

SEQ ID NO: 18942 - protein, 1451 aa, Homo sapiens [sequence omitted]

SEQ ID NO: 18943 - DNA, 1985 bp, Homo sapiens
gaccagcagcctgaactggctggggcatccggaaggcttagatcttgtggccaagagttcagaccgtggcgaagtggagagtgacatgcagttggatggcggtgactgcgtggtatggaagaaaattcagctgaaatttgctagaaaatgagttgttttggaaagagactgtagagaaaggcaaatggaagaagaaagcttctgtgcccccacagataccgactgaaaagtgttagcatgagcaaaagttcctatctaatattatatgctttcctttgctcccaaagtgctgggattacaggcgtgagccaccatgctcagccaaagctgttatttttttaagtatgtattcctagatgttttatacttttatagttattgtgaatggaatgatttttttcctagataacttttaatgaatagaaacagttcctgctttatctccaaattctagaacagtcactggcacacaagtgctcagtgtttaagtgacattgttttcctgcacccaaaagtagaatgctgctcctcattggaagcatgttactttagcaaagtgccactaaaatgaccatagtccatgtgctctgatcacttgtcacagatggtgataaaattcattcacagcttcctttctaggcctgcagcatttgggagacaaaactctgctaaacctttggaagaaaaaagagaccagaggccattggtcccgaaaagtggatggaagatagggaggtagaaggaatgttacaggctgagagggcagctcacactcagctccagccacttcacctcgtgcacacactggctgagggttgccagatgtttgagaaaagctaggaatccagaccattgttaaccattggcaactatagggaacatacagaaagcatctgaactggatgtggtagagctcccagatcatgatctgattgagaatgtccatgaacttctgtcctgattgctcagtgcagactgctgcttcttctggcaagactcctctcttcgcattgacctggagttgtcacaaaatctgtttttctcttgctactcccctgagcatggcaccttctgccagagcgctcccttaactgtgtgggcaggctctgcttcacagctccccgcccactctgcccaagcagaagtgagcccctcctgggcagaaagtgcccgcaatgagggctgaaatgtttctattccctgagtaaccaacctttctctgtttccttgtccaggaaacggaggtggagctgtacaacgaatttcctgaacctatcaaactggacaagaatgaccgggccaaggcctcggcagaaagctgcagttgctgagggggcagtgagagttgagcacagagtccttcacaaaccaagaacacacgtaggccttcaacacaattcccctctcctcttccaaacaaaacatacattgatctctcacatccagctgccaaaagaaaaccccatcaaacacagttacaccccacatatctctcacacacacacacacacacagatctgacgtaatcaaactccagcccttgcccgtgatggctccttggggtctgcctgcccacccacatgagcccgcgagtatggcagcaggacaagccagcggtggaagtcattctgatatggagttggcattggaagcttattctttttgttcactggagagagagagaactgtttacagttaatctgtgtctaattatctgattttttttattggtcttgtggtctttttaccccccctttcccctccctccttgaaggctaccccttgggaaggctggtgccccatgccccattacaggctcacacccagtctgatcaggctgagttttgtatgtatctatctgttaatgcttgttacttttaactaatcagatctttttacagtatccatttattatgtaatgcttcttagaaaagaatcttatagtacatgttaatatatgcaaccaattaaaatgtataaattag

SEQ ID NO: 18944 - DNA, 2797 bp, Homo sapiens
  CDS (584)..(2464)
gaagccctggcaggtcagtggcaggcactgtcacgctgagtcctatgctggcagcggggaaccttggggagaacacgggacaccgcggaagccgggaaatgattgtgcggctgtaaccggcacaggttcgcggtccgagtcactgcaccgagactccaaggcctgcagcagaaacagtttaatagggggagaggagagaagaccccagttccgcctccatgagaggtttggggatgggggtgtttaggggtctggacaggggcggctgaagtgtggggtcgctggttggtggggaagtgacaggcgaatcctgggacgggaggtgaagaaaccgcattctcctgctgagtgggttccctcgtggggttttcaccctgcttggcgccagcctttccgttggaattcaagatctgagaaagaacttgggcaactcgagcagctctccgagatcttatccccaggcacaatgcagaagccggcggtcagtgtcttctgtgacctgactctcaggaaggcggcccccgcgaggcagtggggctcaggtttccattccttggggacacacggctggtcagccagttgaatgattgtatttgggggagaagacagaagtgatctcttccttcctgactctcagactaatgaagagagaaaacaatatgattcagtagcctttgaggatgtggcggtgaacttcacccaggaagagtgggctttgctgggtccatcacagaagagtctgtacagagatgtgatgtgggaaaccattaggaacctggactgtataggaatgaaatgggaagacacaaacattgaagatcagcacagaaatcccaggaggagcctaagatgtcatatcatagagagatttagtgaaagtcgccagccagatagtactgtgaatgaaaaacctcctggagtagatccatgtaaaagcagtgtgtgtggagaaatcatgggttgttcattccttaattgctatatcacatttgatgctggacacaaaccagatgagtgtcaggaatatggagagaagccacatacacataaacaatgtgggacagccttcaattatcaccactcctttcaaacacaggaaagacctcacactggaaagaaacgctatgattgtaaggaatgtgggaaaaccttcagttcttcgggaaaccttcgaagacacataatagtacaacgtggaggtggaccttatatatgtaagttgtgtgggaaagcctttttttggcctagtttatttcgtatgcatgaaagaactcacactggagagaaaccgtatgaatgtaagcagtgttgtaaagccttccctatttacagttcctatctaagacatgaaagaacacacactggggagaaaccatatgaatgcaagcactgttccaaagccttccctgattacagttcctatgtaagacatgaaagaactcacactggggaaaaaccctataaatgtaaacgatgtggaagagccttcagtgtttccagttcccttcgaatacatgaaagaactcacactggagagaaaccctatgaatgcaagcaatgcgggaaagcatttcatcatctgggaagctttcaaagacacatgataaggcacactggagatggacctcataaatgtaagatatgtgggaaaggctttgattgtcctagttcactgcaaagtcatgaaagaactcacactggagagaaaccctatgaatgcaagcagtgtgggaaagcgttatctcatcactcaagctttcgaagtcatatgataatgcacactggagatggacctcacaaatgcaaggtatgtgggaaagccttcatttatcccagtgtatttcaaggacatgaaaggactcatactggtgagaaaccctatgaatgtaaagaatgtggtaaagccttccgtatttctagttcccttcgaagacatgaaacaactcacactggagagaaaccctataaatgtaaatgtgggaaagcctttattgatttctattcctttcaaaatcatgaaacaactcacactggagagaagccatatgagtgtaaggaatgtgggaaagcattcagttgtttcacatacctttctcaacatagaaggactcacatggctgaaaaaccttatgaatgtaaaacatgtaagaaagccttcagtcattttggtaacttaaaagtccatgaaaggattcacactggagagaagccatatgaatgtaaggaatgcaggaaagcattctcttggctcacttgccttctgcgacatgaaagaattcacactggaaagaaatcttatgaatgtcaacaatgtggtaaagccttcactcgttctcgtttccttcgaggacatgaaaaaactcacactggagagaagatgcatgaatgtaaggaatgtgggaaggcactgagttctctcagttccttgcatagacataaaaggactcactggagagatactctataaatgtggaaaagcattcattaattttatttcatttcagaaacgtgaaagaaatcacataggagataagcctcatgaatgcaaacacatggtaaagccttaagatgtttcttttgaatatggttatcccctaaccatatgcaggggattggttccagaccccctaagcatacctaaatccacagatgctgtgttccttttataaaaggacatttgcatgtaacctatccacatcctcctgcatcccataaatcatgcctagattacttaatttttcaccaacccaaagcttttgtaaaagtaaaaataaaaagtaggttactaaaatacctc

SEQ ID NO: 18945 - protein, 627 aa, Homo sapiens
MIVFGGEDRSDLFLPDSQTNEERKQYDSVAFEDVAVNFTQEEWALLGPSQKSLYRDVMWETIRNLDCIGMKWEDTNIEDQHRNPRRSLRCHIIERFSESRQPDSTVNEKPPGVDPCKSSVCGEIMGCSFLNCYITFDAGHKPDECQEYGEKPHTHKQCGTAFNYHHSFQTQERPHTGKKRYDCKECGKTFSSSGNLRRHIIVQRGGGPYICKLCGKAFFWPSLFRMHERTHTGEKPYECKQCCKAFPIYSSYLRHERTHTGEKPYECKHCSKAFPDYSSYVRHERTHTGEKPYKCKRCGRAFSVSSSLRIHERTHTGEKPYECKQCGKAFHHLGSFQRHMIRHTGDGPHKCKICGKGFDCPSSLQSHERTHTGEKPYECKQCGKALSHHSSFRSHMIMHTGDGPHKCKVCGKAFIYPSVFQGHERTHTGEKPYECKECGKAFRISSSLRRHETTHTGEKPYKCKCGKAFIDFYSFQNHETTHTGEKPYECKECGKAFSCFTYLSQHRRTHMAEKPYECKTCKKAFSHFGNLKVHERIHTGEKPYECKECRKAFSWLTCLLRHERIHTGKKSYECQQCGKAFTRSRFLRGHEKTHTGEKMHECKECGKALSSLSSLHRHKRTHWRDTL

SEQ ID NO: 18946 - DNA, 2075 bp, Homo sapiens
gaggcccagcccgcgcggcgacgtctccgcgtggcgtcacggcaccgactgacggccacccaccatggccgcagaccagcgcccgaaggccgacacgctggccctgaggcaacggctcatcaggtacccgggcggggggcgggcggcggggggcgcggggctgcgcggaggggcacgcgcacgcacgacgcacgcacgcacgcactacgcacgcgcctccggctaggaagccgctgctacccatcccgtccggccgctgccccggccccgctggagcttctagggcccgaggcgggcggcgccgttgggcagtcccggcgggtggtctccggggccgcctccccgacagcgccgtctccaggccgcccagttcaggagacggccccgccctcaccgctgttcggctgtgtcagcctcgcttggcagcctttactccggagaagaccttcaccctggcgcctgagaggacctcacccagggtggcccgtcagcagcacctgggcctggctcgagagtgacctgggagggggctgaaagggcagacaagggagagtcgggggagtcggttcacaggcagcacacttgacctgtgagggggccctcggtgggacggtgggtgaggtcgcctcccactggagcttagggctggcacccagcgaggggcagcaggaccacgtggctggcaaggagctgtttagggctgagagccaggcacctaatgttggtgccctgtcccatcccatcgaagacacgcggccttatggagtccccatgggacggggcagccaccttttctcaggatccgggagactgacgcggacacatgcagaaatgagcaaggaggccacagaggctgaaaatgctttcagaaacaatccgaagtttcagcgacttgttaccccatctgcttcctgctttgcaaccacctgtggagtggagagacaaggcagggaagcagcaccttgcccttccagctctcatttcccccccgccaccagaaactgggaaggggtgggcgggggtctgcgatgagtagacttcaccctttcggtcttcaggcatggctgtccactccttgcctgtccccacagctcttcctgcagactctttttttcccgaggatcctgttaagattgtccgggcccaagggcagtacatgtacgatgaacagggggcagaatacatcgattgcatcagcaatgtggcgcacggtcagtatcacacctcaggctggcagggcaggagaggaaggcagtgctgtgaacctggtcccaaggtgacctgagattgccgagaggtgtggagaacctgggtggagttgaggcactgtcagtatgcagaggaggctcagccttcgcaatatagctgtggaattctgcaatctggagctgtgctaaaccaggcaggggtcagcaatctaggtctgtgagtctagttccacttgggactgatgatgagctcacaaagtggcagatggcccagctgtgaccagcaacgtagcacagtgctggccaagtgctggggtcatggcagtgcttcagccccattggccatctcaggtgctaggcaagggagctgaagtaggaattcagtcatcttgatgaggctgccagagctgatggaaagaaagggggtctgagactcagcaggcacatggaagatgaataaagttgaggttaaaaaaaaaaaaaaagcagagactctagtcttagactgcttgggctcaaatccctgtcccctacttactaacttgtgatctcgggcaagttacttaattctcagtgcctcagtttgcttatctgtgaaagacataatgatactaggtacccactttaaggtgtttggagaattaagtgtgttaatttatgtagcttgctctgaatgtgcctggcacatggtgagctctcagtacatattcactgttattatccttggcctttgacaatcaagattaccaccagcccccttggctggtgaagtgaaaccagttgacagtcaccccccaccccacctttgtcatacaagcctcaaaaggccttccagcctgggcaacataatgagaccttgtctctacc

SEQ ID NO: 18947 - DNA, 1213 bp, Homo sapiens
  CDS (20)..(1213)
tggagaagaacctttgccaatgcttccaagttacaagaacttcaagggtactattgaagaactggctccaaatcaatatgtgattagtggtgaagtagctattcttaattctacaaccattgaaatctcagagcttcccgtcagaacatggacccagacatacaaagaacaagttctagaacccatgttgaatggcaccgagaagacacctcctctcataacagactatagggaataccatacagataccactgtgaaatttgttgtgaagatgactgaagaaaaactggcagaggcagagagagttggactacacaaagtcttcaaactccaaactagtctcacatgcaactctatggtgctttttgaccacgtaggctgtttaaagaaatatgacacggtgttggatattctaagagacttttttgaactcagacttaaatattatggattaagaaaagaatggctcctaggaatgcttggtgctgaatctgctaaactgaataatcaggctcgctttatcttagagaaaatagatggcaaaataatcattgaaaataagcctaagaaagaattaattaaagttctgattcagaggggatatgattcggatcctgtgaaggcctggaaagaagcccagcaaaaggttccagatgaagaagaaaatgaagagagtgacaacgaaaaggaaactgaaaagagtgactccgtaacagattctggaccaaccttcaactatcttcttgatatgcccctttggtatttaaccaaggaaaagaaagatgaactctgcaggctaagaaatgaaaaagaacaagagctggacacattaaaaagaaagagtccatcagatttgtggaaagaagacttggctacatttattgaagaattggaggctgttgaagccaaggaaaaacaagatgaacaagtcggacttcctgggaaaggggggaaggccaaggggaaaaaaacacaaatggctgaagttttgccttctccgcgtggtcaaagagtcattccacgaataaccatagaaatgaaagcagaggcagaaaagaaaaataaaaagaaaattaagaatgaaaatactgaaggaagccctcaagaagatggtgtggaactagaaggcctaaaacaaagattagaaaagaaacagaaaagagaaccaggtacaaagacaaagaaacaaactacattggcatttaagccaatc

SEQ ID NO: 18948 - protein, 398 aa, Homo sapiens
MLPSYKNFKGTIEELAPNQYVISGEVAILNSTTIEISELPVRTWTQTYKEQVLEPMLNGTEKTPPLITDYREYHTDTTVKFVVKMTEEKLAEAERVGLHKVFKLQTSLTCNSMVLFDHVGCLKKYDTVLDILRDFFELRLKYYGLRKEWLLGMLGAESAKLNNQARFILEKIDGKIIIENKPKKELIKVLIQRGYDSDPVKAWKEAQQKVPDEEENEESDNEKETEKSDSVTDSGPTFNYLLDMPLWYLTKEKKDELCRLRNEKEQELDTLKRKSPSDLWKEDLATFIEELEAVEAKEKQDEQVGLPGKGGKAKGKKTQMAEVLPSPRGQRVIPRITIEMKAEAEKKNKKKIKNENTEGSPQEDGVELEGLKQRLEKKQKREPGTKTKKQTTLAFKPI

SEQ ID NO: 18949 - DNA, 1958 bp, Homo sapiens
  CDS (565)..(1032)
aaggtgggcctcgagcaaagccgctagaggtggggtgcgggtggtcggcctcaggcgagccccggggcacagcccggggcgggaggcggagcttggcggccgagatctccgcgctgcagttagccccgccgagcgccaggagctgcgggtaggaggggcgagagaaaggatgggggtacagaaccggaagaaacgaagggctcgtccgcttcggcttgtcctaatttggtgcccaatctgaagctgggctgtaccattgcatacctgggggaggctgtggcaaaggtgacaagaaggccgaaggcacaaagggaagctgcacccattcctggaggagcttaaatagtgactcgagtgcaagaatttaaaaataccgagacagccctaggtggaaaacttccggaaggcccaagcgttcgtaagggctctctaccccgctcggagcatagatggtaccgtccggaagtccgggcggagaccgtagctgcgcttctcgcgaaagggcaggcatcgcggggctggccacttccgtacttccgctttccggcccagccagcgcccgcgatgactgccactctccgcccctacctgagtgccgtgcgggccacattgcaggctgccctctgcctggagaacttctcctcccaggttgtggaacgacacaacaagccggaagtggaagtcaggagtagcaaagagctcctgttacaacctgtgaccatcagcaggaatgggaaggaaaaggttctgattgagggctccatcaactctgtccgggtcagcattgctgtgaaacaggctgatgagatcgagaagattttgtgccacaagttgaatagtgcagggtggcccagggctgcttccaggacttgcctgtcctccctgggtttggatgggagagacacaagggcctggacctcagttttctgttctctgccccagctcagtgcacctgtgcaacaactccatccagaagcacctggagaactcatgccatcggcatccactgcttccgccagacaacatgtggtctagccagaggttccaggcccacctgcaggagatgggtgccccaaatgcttggtccaccatcatcgtgcctggcatgaaggatgctgtgatccacgcacttcagacctcccaggacaccgtgcagtgtcggaaggccagctttgagctctatggcgctgacttcgtgttcggggaggacttccagccctggctgattgagatcaacgccagccccacgatggcaccctccacagcagtcactgcccggctctgtgctggcgtgcaagctgacaccctgcgcgtggtcattgaccggatgctggaccgcaactgtgacacaggagcctttgagctcatctataagcagggcccagctcctaacatgcaggtgtcaccagagagaaatgcaccactgtgcccagcaccatagctctggctcagagggtttgcctgagaaagcagcagacagaaaacagaaggtgcgagttgctcccgaaggaactgacttcatgtgcaacagagctcggagaagtccaaggctaagcacactctccagaacagtggaggttgtgctgaaaggcaactgggaggcgacggagagcctgggaggtgcgggctacactggaggccagcaagtctgccagagagaaacagaaaaaaagacaggtgggaagagctctcctggggtcagaacaaagcttaatatcttctttgacaaagaacgtaacatcaaaatagccaactatgggtttagttcaacatttgcaaagagagacaacactgaaaagggaacgtttgatgggactctcccttatgcaggcccagaactcttcttgggccatggataccaatgccctgccatcaacgtttggagccttggcatcatcgtatgcaaaatggtggctggggccctgccattttatgagcagaactgtaaggatatactg

SEQ ID NO: 18950 - protein, 156 aa, Homo sapiens [sequence omitted]

SEQ ID NO: 18951 - DNA, 1512 bp, Homo sapiens
  CDS (188)..(1102)
gagtgaggtttggctgccaccaaagttacttctagtccttgctgtccactcctgccctcagtctggacctgcccaaggacccctgcaattaggcctcccatgcagaggtcagtgagagcccaagccaattgctctaggccccgtggctggctacttatggggcactgtcctgaccagctctgctaagatgctcctggcccctccctccaccccgtccagaggacggacccccagcgccgtggagaggctggaagccgacaaagccaagtatgtcaagacgcaccaggtgatagctaggcgacaggagccagccctgcgtgggagtcctgggccgctcacgccgcacccctgcaacgagctggggccccctgcatcgcccaggacgcccaggccggtccgccggggaagcggcaggcggctgccgaggcctgattccctcatcttctaccgccagcaaggcttcggtgaacaaagagaacgccaagggccagggtctggtgcggcgcctctttctgggtgccccgcgggacgctgccccgagcagcccggcctccacagagcgacctgcggcttcagggggttgggctgcgccccaggatgccccggaagcggcgggaaagcgggcgctgtgtcccacgtgctcgctgcccctgtcggagaaggagcgcttcttcaactactgcggcctggagcgcgcgctggtggaggtgctgggcgcagagcgcttctccccgcagagctggggagccgacgccagcccgcaggccggaacttcgccgccgcccggctccggggacgccagcgactggacatccagcgacaggggcgtggacagcccgggcggcgcgggcggcggcggcggctcggaggcagcgggctcggcgcgggaccggcgccccccggtgtcggtggtggagcgcaacgcgcgcgtcatccagtggctgtacggctgccagcgcgcccgcggaccgccgcgcgagtccgaggtgtgaccgccgcggctccggactggccccgggactggccccgggcacggaaaaggacacccctcttctggcgcgctgggtgcctttgcgtaagcccttccttctggaactcagtttagcgtctgaaccttggggaggtggaacaagttgctgccgaaggcccttccctgctcccgcggcgaagggggagggagaggcctcttggtccctgtggagacccggtctggggagtcacgattggggtgggagatgagcaaacctgctgaataaagttaaaacgttatttaaatggggagctgaggaaggagcaaacgggttttcgcggttaaacccgtgggttttggaatgtgtgttcccggctgtgtgatcctgggcaagaacttgacctccctggacgcagcggcacccctcggttattaaggagggaggagtaggggatagaagtatttcaaaatagttgtaatgcgcatggcaaagtgcccagcatatagaaagtgctcaataaacgataactgctgtgacttct

SEQ ID NO: 18952 - protein, 305 aa, Homo sapiens
MLLAPPSTPSRGRTPSAVERLEADKAKYVKTHQVIARRQEPALRGSPGPLTPHPCNELGPPASPRTPRPVRRGSGRRLPRPDSLIFYRQQGFGEQRERQGPGSGAAPLSGCPAGRCPEQPGLHRATCGFRGLGCAPGCPGSGGKAGAVSHVLAAPVGEGALLQLLRPGARAGGGAGRRALLPAELGSRRQPAGRNFAAARLRGRQRLDIQRQGRGQPGRRGRRRRLGGSGLGAGPAPPGVGGGAQRARHPVAVRLPARPRTAARVRGVTAAAPDWPRDWPRARKRTPLFWRAGCLCVSPSFWNSV

SEQ ID NO: 18953 - DNA, 1955 bp, Homo sapiens
  CDS (1229)..(1573)
cttttcccggagccgcacccaggtcccccaccatcatgcaccccttacccaggcctctgaggggccaggcaccccccaccactcccctacagcaggagagcttagggaggctgagagcttggacagccgggagagggggccggatctctggatctccccagcctccagatctcagtgtggctctctctggagacaaaagctaagactcaacccacaggcaacactcaacacagagatccagctcagaaaaaaaggagctgaccagggaggaatggagaggccaagacacataatgaagactaagaaaaggaagaaagatgatgctggggctggagccaaagggagaggaagaggaaaggaaggaaagccaggggcagagacctggcagggcagcgtgagcccaacaaccacggggtgggggtggggcgcgcatcaagatttctaacaagcgcagctgaaaacacccagggccgttctctgaggccttctctctgcctaccagccctcaccagtgcttcgaagagccctgaggaacgtctctctatttgaagtcagagccgagtgcctgctctcggcacctggggctccatgcttaccaggatggtgggtacttgaccttcatttgctgtgggactgtcagggattccagggacccactggtccccgaactggctcagagatgcaagccacttttacctcctacacatctataatccccaccccatggctgacaaatattcccagtccacagctgtctccacccacccagtgacagagcacaggcagccaaaaggatcaagcaatctcttgccacctcccagcaccccagaatgctaaacagaccctcacatctggactccacatccagcgaggagtgcccctgcccaccacccagatcacacagctgccagttacagaccaccctataggtcccaccacacggccatagcccaccagcatcccagagctgcctctacactaaagctctgtcccagcccagccatccttcaagccacatctggaatagcacacaccctattccactagccaaagcccccaggggtgtaattcagaaggaggcagactgggcctggggcatgtggacaagtccctgacaccacgccctggcttctccggcttgtctgaagaacctgaactgcccttaaggcctgcgcctcccatcccagggcagcccccccgccatacctacactcttggccatgggagaatgtcctcatgtgcggctaaacatcctcctcatgcagccttgaattctgttccttccacgtcacctcaccagacccaggatgaaagccgctcacctagagcaaagcttctgcttccgaggcattcaggactcccctcagggtgtgtgagcaccctggggcacatgcctgttgcttatgtctgggttacctctgtgaccctgggaccgctccacattgaaggccgttgtgtctttttgtggaaggatggaaggacagaagggaaggagagacaaagtggtaccacagccctgttcttgccctggcacttggagggcaccagatacccaggggactgtagctggctgtgaggactctaaggccaggccagcatacacagtccccaatagtgagtaggagcccagtcagtccacaccccttcccatccactcgaaatgtaacttagccctcggcttctccttacctttcaggagttctctccttacccccaaagacttcctgaggaccccctaggccagccagcctacccctctctcccctaacccagcatcctgcagtcccctggttcagattggtggtgtctgtgcctgaacccccacgagcctgaaagcccctcaaaggccacatgggtctcccgcctctctgcatctccagatggtggcacgaggcctagcacacaaggaatcccagaaaatgttggctgaaggaataaatggatggatctaggtt

SEQ ID NO: 18954 - protein, 115 aa, Homo sapiens
MSSCAAKHPPHAALNSVPSTSPHQTQDESRSPRAKLLLPRHSGLPSGCVSTLGHMPVAYVWVTSVTLGPLHIEGRCVFLWKDGRTEGKERQSGTTALFLPWHLEGTRYPGDCSWL

SEQ ID NO: 18955 - DNA, 1817 bp, Homo sapiens
catgtccagaagcaatccacagtttgagaaaccaagtttgggtaagatttctggggtccattgctggtttacagggataatcagacagactatttgaaatctatcaggatgatgatgatttctgtcaggcctgatggggctcagctcatgaatagcatgggggttctgggatcagctccctgggacagggcaggcctggaggggtcacctgtaaaaagttggtaagcaggggcattgtcaccaggcttcctcttccatgtcaatggagtctggaggcagagttggaatccagctctgcacctttttgctgtgcaccctcaggcgggtcagcaacctctctgaacacacacccagtctacaaaatagaagaaaaaccctataaggtggtttttggcaggggagaggacatgggaagagattgaataaattagttgtccatcctagcatagagcccagaacaaggcactgaaaagacttcttaaatttttttgtccaacaacatcttggacagttctcatttatgtcaacatgcctggtcctgattttgttggtcatatttgcatgtcatattttaaaccatgaagcataataaccaactaagtaagaaagccctggcaaaaaagctgagaggtctggtgcagtggatcacgcctgtgatcccagcacgtttggaagccgaggtgggcagattgcttgagcccaggagttcgagaccagcctggacaaaatggcaaaaccccatctctgctaaaagtacaaaaagcagctggatgtggtggcactcacctgtaatcccaggtactcaagagactaagacacgagaatcacttgaacccaggagacacagggtgcagtgagcctcctgcactccagcctgggtgacagagtgagactctgtctccaaaaaaaaaaaaaaaaaaaaaaaaattgctgagaaagccctaattgttgttgttgttgttgttgttgttgttgttgttattgctgaaatggggtctcgctatgttgcccaggctggtcttgaactcctgggctcaagcaatcctcctgcctcagcctcccaaaacgttgggattacaggcatgagccacctcacccagcccccttgtagttttaactgtgttctacagtaaccctagaatttgcctccttattttctattaaaatgagacatacttgaacaatattcagtcaaaatagaaatatatacagtcaaaagcaactgccacataattgccaaaacttggaagcaaccaagaagtccttcagtaggtggatagacaaaaactaatggaatattatttagggctagaaataaatgagccatcacgtcacaaagagacatggagaaaccttccatgcatattactaagtgaaagaggccactctgaaaagactacctattgtttgattccaactatatgacattctagaaaagttaaaactatggagacagtaaaaaggtcagtggttgccaggggctgggaggacagagggatgaaaaggtggaacagggaggatttcagggcggtgaaactactctgtgtgatattacactggcggatgcatgtcactgtgcacttgtccagacccacagaatgtgcactccgaagtgtgaaccctcgtatggactatgaactctaagcaataatgacatgtccgtgtagggtcatcagttacacatgtaccagtctgatgtgggatgatggtagtaagggaccctgtgcctgtgtggtgggaggaggtgtgtgggaactctgtacttctactcacttttgctgtgaacctaaaactgctctaaaaaaaaaaaaaagcct

SEQ ID NO: 18956 - DNA, 2152 bp, Homo sapiens
tggtgttgccattaatggtagttagaaatatgaagaggaggccgggcgtggtggctcacgcatgtaatcccagcactttgggaggccgaggcgggcggatcacgaggtcaggagatcgagaccatcctggctaacatggtgaaactctgtctcactaaaaatacaaaaaattggccgggtatggtggtgggcacctatagtcccagctactcgggaggctgaggcaggagaatggtgtgaatccgggaggtggagcttgcagtgagccgagattgcgccactccgctccagcctgggtgacagagcaagactctgtctcaaaaaaaaaagaaaaaagaaaaaaatacgaagaggaggcagttggaagagtagttccatcttggccaggttcagttgctggtgggcagcctaccagagaatactcacaggcagtcgtggctgcagatggggacctgagcataaacctttggaaagatgcagtttaggacaggggaggagaagggtgatcagaagtatggggaaaaccaagagcctggatgctcaggaaggatccgccggaaggaggagtttggtcagcagcatcagatactgctgtcattttttagaaagatgaaaagagcaacagtccttggatttagtggttagaaggtagtctttgttgctttctggaggaccatgtcagtgaagacgcagaaactgcatttcgggagaggatgtggatggtggggaagcagaattggggctgttagagaccttggtgcagggttgtggtggaaggaggggatggagcagggctaagaggcgtggtttaggagtggagagacgtgagcaggtttgtggactgaggggagaggagctttggtggaggaaaacattgatgctataggaaagcaggaagatggaacaaggtctcagaagagctggagcttgggctcactggtgcagtgctcacttggagttgcacctctctggccaactgtatatgtactctttatagtctttctctggtatatacttaaggaacattttagaatgtttacaaagaaggtcaagcatagataataaaaaatggcatggtttgagtggtatgttaagatatttgaatggtgatataccaaaataaatattgcatcatgcacatttggctggcagttcatcatttttctgctcagttgattgacgatatgtttattacacaatgtgtctgtgagtgtcttgtgcatagagattgtattagtccattttcacactgctgataaagacatagctgagcctgggaagaaaaagagatgtttttgtttgtttgtttgagatggtgtctcgcttcttgcccaggctggagtgcagtggtgcgatctcggctcactgcaacctccgcctccggggttcaagcagttctcctgcctcagcctcctgattagctgggattgcaggcacatgccaccatgcccggctaattttttgtatttttagtagagatggggtttcaccgtgttggccaggatggtctcaatctcctgacctcatgatccgtccacctcggcctcccaaagagctcggattacaggcgtgagccactgcacctggccaaaaaagaggtttaattggacttacagttccacatggctggggaggcctcagaatcatggcgggaggtgaaaggcacttcttacatggtggcggcaagagaaaatgaggaagatgtaaaagtggaaacccctgataaaaccatcagatctcttgagacttattcactatcacgagaacagtatgggggaaacctaccctatgattcaaattatctcccaccagtccccccccagcaacatgtgtgacttacaggaggagtacgattcaagatgagatttggggccaggcgcggtggctcatgcctgtaattccagcactttgggaagctgaggccggtggatcacctgaggtcaggagttcgagaccagcctgactaacatggagtaaccccatctctactaaaaatacaaaattagctgggcacagtggcacatgactgtaatcccagctactcgggaggctgaggcaggagaatctcttgaacctggggggcggagtttgcggtgagccgagatcttgccattgtattccagcctgggcaacaagagcaaaactctgcctc

SEQ ID NO: 18957 - DNA, 1946 bp, Homo sapiens
taagaagcccttgcatgtgcagttcacaacagggttcatgctcctataaaaatatagtcctgtcactgatctgacaggagatggtgtgcaggcagtaatgcttgcttgcccagtgctcacttgctgtgcggcctggttcctagcaggccatgggccagtaccagtctgcagcctggggttaaagggccaaaggtgtctgcctctctgctggcctaacagcacaggaaagggagacagcactgtcttaccattccctaacctctgcccaacaatatactagagagaaatacatcaaattgccgttctatgttggtatcagagagttaaatcagaactgtactgtcctggttctgtcactagccctgagaccttacctctgggttccatgagtgggacagaaggagagaggatgctagcagtgctggctacagtttgctttcttgctcacctggtagaaccgaggtagggccagaatacagtccatcagcttgtggcggcccaagttgatgagcattgtgttctggccagtgttcagaaagtgaatctgcagagttatcaacttggtgagccgctgacagtgctgggcctgtcgcacacaggagtcctgaggaacaagggtggagaggcacagtagagaaagacctagttgtcacctcctgtgtgaaccctcacaacggtattcaccccttctgttcctggttggcctatgatgccctcccgcttcacctggaaagagcccaaggacaaaagaaaataattttactgcagacagcaagtcccaaggccagtctgaaaaaagcctttgggttaccttggcataactctctgctgcatccaacatcagagtcagggccttcagcagcagttgtttcagctggtgcccatccttgaggctgtcctctgtaggggaaataaagaagatttgccgagtctgactcccaaagctcactgttctcatcccactcattgtgatcgtggctagaatagaaacatcccagccatgttcacaggcaggcaggaacacctcactcagataaaggttattgggccagaaatgcatacgcttattgtaacttcactccgcagtaggattcagtgccccttctaatgcctcatttctccaaaacatcaaggaaggcttacatggtatcaacgtgcatgttggttcctggtggatgataccctggatatataggctatagatccaagagtacaatcctaaattgcacatgccttcaaagtctccattccatctgtctgcccaagtgggggtcctgctgagcgacatacccacctcaacattctttttttgagatggagtcacactctgtcacctacgctggagtgcaatgggcgcgatcttggctcactgcaacctccgcctcccgggttcaggtggtccacctgcttcagcctcccaagtagttgggattgcaggtgcatgccgccacacctggctatttttttttttgtattttggtagagacaggattgcaccgtgttgcccaggctggtgttgaactcctgagctcaggcagtccacctaccttggcctcccaaagtgctgggattacaggcgtgagccactgtgccgggccacctacctcaagattctaatagcccatctcatgggctcttgtcctttgctgtaagaattttatcgagggccgggcatggtggctcacgcctgtggtcccagcactttgggaggccaacgtgggcagttcaccaggtcaggagttcaagaccagcctggccaacgtggtcaaaccccatctctattaaaaatacaaaaaaattagccgggtgtggtggcaggtgcttgtggtcccggctacttgggaggctgaggcgggagaatcacttgaacctgggaggcggaggttgcagggagctgagatcgtgccactgcactccagcctggggacagagcgagactctgtctc

SEQ ID NO: 18958 - DNA, 1878 bp, Homo sapiens
cataaaagaatacttgaaactgggcagtttataaagaaaaaaaagtttatttggattatgattccaccagctgtacaagaagcatggcgtcagcatctgcttctggtgagggcttccaggagcttccaaacattgtgcaagtggaaggggagctggtgtgtcacatggtgagagaggaagcaagagacgaggaggtgccatgctcttttaaacaaccagttctcacgtgaactcactcattacctcgaaggaggacagcaagcctttcgtgagggatccgcccctatgacccaaacacctcccactaggccccacctccaacgtgggagatcaaatatcaatatgagatttggaggggacaaatatccaaaccatatcactaggtttaagaggagaggagccatttttgcttctaccccttgatggctagtcctgtgtattctggctggggaagaaatagaactgatgcagcttgtattctttgtcccgaaagagtccaacttgtcaagatgtcatctcccaactggctccatggggaatgttgggctaacaaatggtgctttttaaaacaaagtacagaatttttgcaaatacagtagtggctaaggttcttttgactttaacactgcattgcatggtgaatcagtggtttaaaaattgcattggaggggagcctattttttttttcttcacctctccttgagtgctttaaagtggccatcagatgcccatagatgtccagtctgctgttcccagcatcactcatcaccagagaatcggctggcttcctgggggtgtactggtatctttctcatggtcagcctttgtttatcttgggggaggggggcaaatagcagcagcattcactaattaatcagcagctgtgtagcagtccatcaccctgcatgtcagggaatagtgctggcagagtgattaaaagcatgggctgtagtgtggcacagctctgggctgaggcctgcagatttgctgggagacccatctctctcatttgctctgtgacctcggatgagttacttaggccctgtgagtctgagtttcttatctgtaaaatgcagtatatttcctggcgttgttagaattgaataaagtcatcagaaaaggcattggttagacccctagataattctcagtaaatgatagctatttttataccaaatgcagagaagagtcaaatgtaagtgcaagatttcctccccaagacaggaatgatgtaaagaattcctttgaaccttcattccttcatctgcaaaatgagggcgtttgtcctaatcaatccctctccaagggctgttgttcaccatattgggtgggcaactgcacgatagaacagtgtggaatgtggcacagcccaggtcaccaggaccacaggcattggtcagagaagtcagtgttcacaagggcgagggcagcccggagaggtaggtttcgtgcttctaggacagggaaggatagggagaagtgggaggactttgagggactctccgtctctgagggagtagccagcagggtggaagaaagtaaaaatgccttgtactaatagaatgctttcaagaataccgagtatttggccaggtgcagtggctcacaactgtaatcttagcactttgggaggccaaggcgggtggattgcctgagctcaggagttccagaccagcctgggcaacacggtgaaactccgtttctactaaaaaaaaatacaaaaaaattagccaggcagggcggtgcatgcctgtagtcccagctccttgggaggctgaggcaggagaattgcttgaacccaggaggcagagattgcagtgagccgagatcacaccactgcactccagccttggcgacagagccagactctatctcagg

SEQ ID NO: 18959 - DNA, 1046 bp, Homo sapiens
atgcaaatattagaacgtgacaaataatggtcagcagaccaggtaagagacaggatttaattttctagctcaaattactggtttttaattataaccttgacatctgtaatcattaatattttgggaagcagtcccttttcatgcttatgttacttggatatatacttgttttaattaaaattgggggccaggcgtggtggctcctgactgtaatcccagcactttgggaggccaaggcaggtgatcacttgaggtcaagagttcgagaccagcctggccaacatagtgaaaccccgtctctgctgaaaatacaaaaattagccaggcatggtggcaggcacctgtaatcccggctacttgggaggctgaggcaggagaatcacttcaatgcagagggtagaggttacagtgagccgagatcttgccactgccctccagcctgggcaacagagcaagaccttgtctcagaaaaacaaaaacaaacaaaagctgtatatatttgcaaaaacactatagtagacataccagaccatcagctccctagggctttttatgaaaaacagcagtccttccccactccccttcccagccccttagaagcagtcattttcaactctccagttccttttggtatatctctctaaataataagcctcttttgctttacagtgtttgttattatttattaacttcactccttaaatagtggtcgtttttggtaggcttacctgaccacctcacatgccaacattaattgtcactctggggccaggcacctggctcacgcctgtaatctcagcactttgggaggccgaggcgggcggatcacaaggtcaggagatcgagaccatcctggctaacacggtggaaccccatctctactaaaaatacaaaaaattggccgggcgtggtggtgggcgcctgtagtcccagctactctggaggctgaggcaggagaatggtgtgaacccaggaggcggagcttgcggtgggctgagatcgcaccactgcactctagcctgggctacagagcgagactgcgtctc

SEQ ID NO: 18960 - DNA, 2947 bp, Homo sapiens
  CDS (616)..(2892)
actccgatcagctgatcccaactgacaacaggagaggaggaagcccgggaggcaacgaaggaggagggtggcggagatggagatgaggatggatctgccggtgtcctgaggaatagcctctgcccccactggcgccctgcggccccccgacgccgccttgctgcggccgagcttctcagtggtatcccctgaaatactgacttcaggtcgaattatattgaaaagctcctgaccactttctttcattaccaaaactttgtagctgatgtccaaccgatgaacccaccaccgtgaacccatcagacctctctcagatagccataaaagacccttccaagtcaattttgaccacatctttgcttgcactttatggaggatgaaaccatcaaaccaaatcaacgttgctgctaatacaagagtcttagaggcagcaaattaaaaatttgaacatttgtttgtgaagaactataacaggacatgaaaggtgttcttttttaaagtgttcagaaccctgtggaagtttcgtgcagtcttcagactcaaatcttcgtcttcacccccggggcaagctcagtgactattatatggtgggtgtgtttccttaccagcgtgagtatgagtgcccagacttccccagcagagaagggcctgaatccggggctgatgtgccaggaaagttacgcttgcagcgggactgatgaagctatctttgagtgtgatgagtgctgcagtctgcagtgtctccgctgcgaggaggagctccatcggcaggagcgcctgagaaaccatgagcggataagactcaaacctggccatgtcccttactgtgacctctgcaagggtctcagtgggcatttaccaggtgttaggcagagggcaatagtgaggtgccagacctgcaaaattaacttgtgcctggagtgccagaagaggactcattctgggggtaacaaaaggagacaccctgttactgtgtacaatgtcagtaatctccaggagtcactggaggcagaagagatggatgaggagaccaagaggaagaagatgactgagaaggttgtgagtttcctcctagtagacgaaaatgaagaaattcaggtaacaaatgaagaagactttattagaaaattggactgcaaacctgatcagcatctgaaagtggtttccatttttggaaatactggtgatggaaagtctcatactctcaaccacactttcttttatggtcgtgaagtctttaaaacctccccgacccaggagtcctgcactgtgggagtgtgggcagcctatgacccagttcacaaagtagcagtgatcgatacggaagggctcctgggggccaccgtgaatctaagccagagaacacggctgctgcttaaggtcctggccatctcagacctcgtcatctatcgaactcatgcagaccggctgcataacgacctcttcaaattccttggggatgcctcagaagcttatctgaagcacttcaccaaggagctcaaggccaccactgctcgctgtggcctggatgtccctttatccacactgggccctgcagttatcatcttccatgagaccgtgcacacccagctactgggctctgatcatccctcagaggtgccagagaagctcatccaggaccggttccggaagctgggccgtttccctgaagcctttagttccattcactacaagggaacgaggacttacaaccctcccacggacttttctgggcttcggcgtgctttggagcagctactagagaataacaccacccgttctccccggcacccgggagtcatcttcaaagccctgaaggcactaagtgaccgcttcagcggtgagatccccgatgaccagatggcgcacagctccttttttccagatgagtatttcacctgctcctccttgtgcctcagctgtggggttggatgtaagaaaagcatgaatcatgggaaggaaggagtgcctcatgaagccaagagccgctgcagatactcccaccagtatgacaaccgagtgtatacctgcaaggcctgctatgagagaggcgaggaagtcagtgtagtgcccaaaacatctgcttccactgactccccctggatgggtctcgcaaaatatgcctggtctgggtatgtgatcgaatgtcctaactgtggcgtggtctatcgtagtcggcagtactggtttggaaaccaagatcctgtggatacggtggtgcggacagagattgtgcatgtgtggcctggaactgatgggtttctgaaggacaacaacaatgctgcccagcgcctgttggacgggatgaacttcatggctcagtcggtgtccgagcttagccttggacccaccaaggctgtgacttcctggctgacagaccagatcgcccctgcctactggaggcccaactcccagattctgagctgcaacaagtgtgcgacgtcctttaaagataacgacactaagcatcactgccgagcctgtggggagggcttctgtgacagctgttcatcaaagactcggccagtgcctgagcggggctggggccctgcgccagtgcgggtctgtgacaactgctacgaagccaggaacgtccagttagctgttaccgaggcacaagtagacgatgaaggtggaacgctcattgctcggaaggtgggcgaggccgtgcagaacactctgggagccgtggtgacagccattgacataccactaggtctggtaaaggacgcggccaggcctgcgtactgggtgcctgaccacgaaatcctccactgccacaactgccggaaggagttcagcatcaagctctccaagcaccactgccgggcctgcggacagggcttctgtgatgagtgctcccatgaccgccgggctgttccttctcgtggctaggaccatcccgtccgagtctgcttcaactgcaataaaaagcccggtgaccttt

SEQ ID NO: 18961 - protein, 759 aa, Homo sapiens
MSAQTSPAEKGLNPGLMCQESYACSGTDEAIFECDECCSLQCLRCEEELHRQERLRNHERIRLKPGHVPYCDLCKGLSGHLPGVRQRAIVRCQTCKINLCLECQKRTHSGGNKRRHPVTVYNVSNLQESLEAEEMDEETKRKKMTEKVVSFLLVDENEEIQVTNEEDFIRKLDCKPDQHLKVVSIFGNTGDGKSHTLNHTFFYGREVFKTSPTQESCTVGVWAAYDPVHKVAVIDTEGLLGATVNLSQRTRLLLKVLAISDLVIYRTHADRLHNDLFKFLGDASEAYLKHFTKELKATTARCGLDVPLSTLGPAVIIFHETVHTQLLGSDHPSEVPEKLIQDRFRKLGRFPEAFSSIHYKGTRTYNPPTDFSGLRRALEQLLENNTTRSPRHPGVIFKALKALSDRFSGEIPDDQMAHSSFFPDEYFTCSSLCLSCGVGCKKSMNHGKEGVPHEAKSRCRYSHQYDNRVYTCKACYERGEEVSVVPKTSASTDSPWMGLAKYAWSGYVIECPNCGVVYRSRQYWFGNQDPVDTVVRTEIVHVWPGTDGFLKDNNNAAQRLLDGMNFMAQSVSELSLGPTKAVTSWLTDQIAPAYWRPNSQILSCNKCATSFKDNDTKHHCRACGEGFCDSCSSKTRPVPERGWGPAPVRVCDNCYEARNVQLAVTEAQVDDEGGTLIARKVGEAVQNTLGAVVTAIDIPLGLVKDAARPAYWVPDHEILHCHNCRKEFSIKLSKHHCRACGQGFCDECSHDRRAVPSRG

SEQ ID NO: 18962 - DNA, 3725 bp, Homo sapiens
  CDS (182)..(922)
agccgcctcgcgcccggtcccgcggtcgcagctccagccgcctcctccgcgcagccgccgcctcagctgctcgctctgtgggtcggtcctctccggcacttgggctccagtcgcgccctccaagcccttcaggccgccccagtgtcctcctccttctccggccagacccagccccgcgaagatggtggaccgcgagcaactggtgcagaaagcccggctggccgagcaggcggagcgctgcgacgacatggccgcggccatgaagaacgtgacagagctgaatgagccactgtcgaatgaggaacgaaaccttctgtctgtggcctacaagaacgttgtgggggcacgccgctcttcctggagggtcatcagtagcattgagcagaagacatctgcagacggcaatgagaagaagattgagatggtccgtgcgtaccgggagaagatagagaaggagttggaggctgtgtgccaggatgtgctgagcctgctggataactacctgatcaagaattgcagcgagacccagtacgagagcaaagtgttctacctgaagatgaaaggggactactaccgctacctggctgaagtggccaccggagagaaaagggcgacggtggtggagtcctccgagaaggcctacagcgaagcccacgagatcagcaaagagcacatgcagcccacccaccccatccgattaggcctggctcttaactactccgtcttctactatgagatccagaacgccccagagcaagcgtgccacttggccaagaccgcgttcgacgacgccatcgccgagcttgacaccctcaacgaggactcctacaaggactccacgctcatcatgcagctcctccgcgacaacctcacgctctggacgagcgaccagcaggacgacgatggcggcgaaggcaacaattaaggccccaggggaactggcagcgcacgcggatgctactactgcagtctttatttttttcccatgagttgggggtcgggtgggggagggaaagggagggatgaccttcccagggagaaacccacgacctgtcctgtctttgatcgcctctttgacatttttgccaaaataccactagtggaaagtcaggctagctgtgctggtattggaatagcagcctcacactggcgtctggactgttctgtagattcatgcaagtggagctgtctgtctctaatttaacttattgctagataatagggttttcagatgaaaagaaaacttaaagaggaatggccctcattcagtaagttctgtggttccagtaaggatttttatgtacatacgctctcgtctctcgttttgggtactttctatctcatctgtctcggctctgcatgttttccagggtgtagcctacagacatggaacagtgtaaatcccagactgacagacttagaacctgaggtctcattcatccttatggtttaggccttgccagttttccgaagtctctgattagttgacagtattaacactaaattgcagtttacagtatttctacattacagccatatgtaacatcaagccatcgattgtgtacttttcctttgctagttgtttgggctttaacatccttattcagccttatccaggttggttttgctgttgatcggtctcctaggctaaatgagaatgaaagcgacttcaggtttttggttcataggtgctcggcaggtggctgtgggattttttttttttggtccttctttcctcttaacgtaaatccaccaccaaaattattaatcctcttgagagaaacgtgaaacgccacaaaaatagagaaaattcaggtctgtatgtcatggatcgtgttggtattttcagagaacatcccgcttctgaagctgctgcagctccctcctcagggatcacactgccgtcacccactctgcactggggcgtttcctactgcgcctcgtgctggcggacgcagctgggtgcagaagctgtggggtcggagaggcgtttggagaaggtctgtggtgcagtgtgtgaaaattcaggtgctagaagcctactggtagaaaaacccaaaaggaagagctatatccttaaccattctgtccaatttcgggagccttgtcagtgtgtcagtttttcctccccgaagacactccttccccaagtaattgtaggaagataaaaaaaactgttaccagataacaaacactgaactcctatttgaccagaactttttcctctcgagatagttttttctttttaatgaaaaaagcataggaattggagattggcttgtctcacgcagccagtgcacatttggaattgacggaaacaacgttgctatttccacccatttgttttcggcagccttaaggccctcattctcatttcgggtgaatctgtctatctgtgaacgtggcccgcatgtgcattcttttttttatatatataaagtcagtgacgaggaactcccgagacgtgtaatgacaccacacttgttttctttgtttctttgttttatttgggcaagaagaggtgtgagtaattgaggaaaaactgacagatgcttttgctaataccaaaattgagcttacaattaggaactgagtatgtgtaacaggatacaggtgacagtgaagatagaagaaccacgatgaccacagactcaatgtgctctgtaacatcgcacagtttacccagcatgactttccttaggaggccccctcctcacgctagagtaaaagtcccagttaagtgaagcctaccagaagaactagtagaagaagctttgccgcttttgtgcctctcacaggcgcctaaagtcattgccatgggaggaagacgatttggggggggagggggggggggggcagggtaggtggggctttccctaatttatcttcatgtccagtgagcagtgttgcgtttttccttgtagcatttggaaatgatttactggaattacaaaacctatttttcctttaaatttcagctttggctctggctgctttttagaataatgcaagataaaaatcacacctgagggctgaaaacggagagggaaagggagacttgatatttaagcagcttgaatggtttttcttttctttatttttaaagaaatgcacttgcctatgatactgtctctccagtgaaatgattactcctccattactctattgatacaatattgtgcatgctagtgttgtatttctatacagtagcttgaaattgattaacttatactgtaggtgttatgtattcctatgacaaaaaaaattaagtcttcaaattttttaaaggttttttttttttaatttaatttttccttttgggggtaaagtttgctctaccaaatagtgattgtaacaaattgatctgttttggatgttgctatagtgacatgcagttatatattttgtttttaaaagggggggagcaaaagaaacaccagtgttagcttaatcttaatgtctggtgtttgtcatggtgaaattataactattacagtgttggagaacaacaaatatgttctctgaatgagcctttgtgctttttgtcatgttatgcagtgaactatttttaaggtctaatcagtgattatttttccagctccgtgtttctctaaggaattatttcacacacggaccatctttagcagtttcctcagtgatggaatatcatgaatgtgagtcattatgtagctgtcgtacattgagcaaataaacttacagatctg

SEQ ID NO: 18963 - protein, 247 aa, Homo sapiens [sequence omitted]

SEQ ID NO: 18964 - DNA, 2942 bp, Homo sapiens
  CDS (407)..(2545)
attttgggcttcgcttccaccgcaccagccggcctacccagtccttccggtatcgcgttgctcaggggcttttcaaccctctgtcagtcggaaaaccatcgccgaggccgtggggggactcctatccatggtgttgaagcgtcgagccgactagggaacctccttccccgccaggatggaagtcgcatcagtcgccgcctattgcgcgggctgttcttccctgtgttctgccgcccgctgccgcattcgctgccctctgtggcttttctgctggctcgaagatcggcctggagcagcgacgccaccgctgggcaaggccgagactctgtaggcttcctccgaatcccgtcgacctccagccgctgagcgccgcggccctacctgagagactgtcaagaaaaaggagatggagccggggacaggcggatcgcggaaacggcttggccctcgggcgggcttccggttctggccaccctttttccctcggcgatcgcaagcaggctcttctaagttcccgacgcctcttggcccggaaaactccgggaaccccacactgctttcctctgcccagcccgagactcgggtcagttactggacgaaactgctctcccagctccttgcgccgctccccggattgcttcagaaggtgctaatttggagccaacttttcggtggaatgtttccgaccagatggctagattttgctggagtctacagcgccctgagagccctgaagggacgggagaaaccagccgcccccacagcgcagaaatctttgagttcgctgcagctcgactcctcagacccctcggtcaccagtccccttgattggctagaggaagggatccactggcaatactcgcccccagacctaaaattggagcttaaggccaagggaagtgctttggaccctgcagcacaggcttttctcttagagcagcagctgtggggagtggagctgttgcccagtagccttcaatcccgtctgtactctaaccgggaacttggctcttcgccctctgggcctctaaacattcaacgcatagacgatttcagtgtggtatcctatttgctgaacccttcctacctggactgctttcccaggctagaagtcagctatcagaacagtgatggaaatagcgaggtagtcggcttccagacactaaccccagagagcagctgcctgagagaggaccattgtcatccccagccgctgagtgcagaactcattccggcctcgtggcagggatgtccacctctttctacggaaggcctaccagaaattcaccatcttcgcatgaaacggctggaattccttcaacaggctagcaaggggcaagatttacccacccctgaccaggataatggctaccacagcctggaggaggaacacagccttctccggatggatccaaaacactgcagagataacccaacacagtttgttcctgctgctggagacattcctggaaacacccaggaatccactgaagaaaaaatagaattattaactacagaggttccacttgctttggaagaagagagcccttctgagggctgtccatctagtgagatacctatggaaaaggagcctggagagggccgaataagtgtagttgattactcatacctagaaggtgaccttcccatttctgccagaccagcttgtagtaacaaactgatagattatattttgggaggtgcatccagtgacctggaaacaagttctgatccagaaggtgaggattgggatgaggaagctgaggatgatggttttgatagtgatagctcactgtcagactcagaccttgaacaagaccctgaagggcttcacctttggaactctttctgcagtgtagatccttataatccccagaactttacagcaacaattcagactgctgccagaattgttcctgaagagccttctgattcagagaaggatttgtctggcaagtctgatctagagaattcctcccagtctggaagccttcctgagacccctgagcatagttctggggaggaagatgactgggaatctagtgcagatgaagcagagagtctcaaactgtggaactcattctgtaattctgatgacccctacaaccctttaaattttaaggctccttttcaaacatcaggggaaaatgagaaaggctgtcgtgactcaaagaccccatctgagtccattgtggccatttctgagtgtcacaccttactttcttgtaaggtgcagctgttggggagccaagaaagtgaatgtccagactcggtacagcgtgacgttctttctggaggaagacacacacatgtcaaaagaaaaaaggtaaccttccttgaagaagttactgagtattatataagtggtgatgaggatcgcaaaggaccatgggaagaatttgcaagggatggatgcaggttccagaaacgaattcaagaaacagaagatgctattggatattgcttgacatttgaacacagagaaagaatgtttaatagactccagggaacatgcttcaaaggacttaatgttctcaagcaatgttgagttggcagcctgtagtcctagctagcatacactacctcttacctgagaggtgtcttttaaaaacaaatcttggcagctgtcctttgacatttttttttttagaggaaatgtaacttggatctagtttaatttttttttttgcaacatatcccactcagaaacattcaggtttgaagccagccctgataatgaaggatgaactagtgtgatttctaatcctcccttttttgatttagttggatgtgcttttaaatgtcctttgcctgcatgaggtggaaaggggacctttttgagttgtcattttgcactttcaaaacttattttcttggaaaacaatacttatagggcttaaagcccattttcatttctaatctaaattatgtgtgcctatctg

SEQ ID NO: 18965 - protein, 713 aa, Homo sapiens
MEPGTGGSRKRLGPRAGFRFWPPFFPRRSQAGSSKFPTPLGPENSGNPTLLSSAQPETRVSYWTKLLSQLLAPLPGLLQKVLIWSQLFGGMFPTRWLDFAGVYSALRALKGREKPAAPTAQKSLSSLQLDSSDPSVTSPLDWLEEGIHWQYSPPDLKLELKAKGSALDPAAQAFLLEQQLWGVELLPSSLQSRLYSNRELGSSPSGPLNIQRIDDFSVVSYLLNPSYLDCFPRLEVSYQNSDGNSEVVGFQTLTPESSCLREDHCHPQPLSAELIPASWQGCPPLSTEGLPEIHHLRMKRLEFLQQASKGQDLPTPDQDNGYHSLEEEHSLLRMDPKHCRDNPTQFVPAAGDIPGNTQESTEEKIELLTTEVPLALEEESPSEGCPSSEIPMEKEPGEGRISVVDYSYLEGDLPISARPACSNKLIDYILGGASSDLETSSDPEGEDWDEEAEDDGFDSDSSLSDSDLEQDPEGLHLWNSFCSVDPYNPQNFTATIQTAARIVPEEPSDSEKDLSGKSDLENSSQSGSLPETPEHSSGEEDDWESSADEAESLKLWNSFCNSDDPYNPLNFKAPFQTSGENEKGCRDSKTPSESIVAISECHTLLSCKVQLLGSQESECPDSVQRDVLSGGRHTHVKRKKVTFLEEVTEYYISGDEDRKGPWEEFARDGCRFQKRIQETEDAIGYCLTFEHRERMFNRLQGTCFKGLNVLKQC

SEQ ID NO: 18966 - DNA, 2608 bp, Homo sapiens
  CDS (439)..(2043)
ctattcagtaccaataccaggataacataaaagagctagaattagaagtcatcaatctgcaaaaggaaaaggaagaattggttcttgaacttcagacagcaaagaaggatgccaaccaagccaagttgagtgagcgccgccgcaaacgtctccaggagctggagggtcaaattgctgatctgaagaagaaactgaatgagcagtccaaacttctgaaactaaaggaatccacagagcgtactgtctccaaactgaaccaggagatacggatgatgaaaaaccagcgggtacagttaatgcgtcaaatgaaaggagatgctgagaagtttagacagtggaagcagaaaaaagacaaagaagtaatacagttaaaagaacgagaccgtaagaggcaatatgagctgctgaaacttgaaagaaacttccagaaacaatccaatgtgctcagacgtaaaaacggaggaggcagcagctgccaacaagcgtctcaaggatgctctccagaaacaacgggaggttgcagataagcggaaagagactcagagccgtggaatggaaggcactgcagctcgagtgaagaattggcttggaaacgaaattgaggttatggtcagtactgaggaagccaaacgccatctgaatgacctccttgaagatagaaagatcctggctcaagatgtggctcaactcaaagaaaaaaaggaatctggggagaatccacctcctaaactccggaggcgtacattctcccttactgaagtgcgtggtcaagtttcggagtcagaagattctattacaaagcagattgaaagcctagagactgaaatggaattcaggagtgctcagattgctgacctacagcagaagctgctggatgcagaaagtgaagacagaccaaaacaacgctgggagaatattgccaccattctggaagccaagtgtgccctgaaatatttgattggagagctggtctcctccaaaatacaggtcagcaaacttgaaagcagcctgaaacagagcaagaccagctgtgctgacatgcagaagatgctgtttgaggaacgaaatcattttgccgagatagagacagagttacaagctgagctggtcagaatggagcaacagcaccaagagaaggtgctgtaccttctcagccagctgcagcaaagccaaatggcagagaagcagttagaggaatcagtcagtgaaaaggaacagcagctgctgagcacactgaagtgtcaggatgaagaacttgagaaaatgcgagaagtgtgtgagcaaaatcagcagcttctccgagagaatgaaatcatcaagcagaaactgaccctcctccaggtagccagcagacagaaacatcttcctaaggatacccttctatctccagactcttcttttgaatatgtcccacctaagccaaaaccttctcgtgttaaagaaaagttcctggagcaaagcatggacatcgaggatctaaaatattgttcagagcattctgtgaatgagcatgaggatggtgatggtgatgatgatgagggggatgacgaggaatggaagccaacaaaattagttaaggtgtccaggaagaacatccaagggtgttcctgcaagggctggtgtggaaacaagcagtgtgggtgcaggaagcaaaagtcagactgtggtgtggactgttgctgtgaccccacaaagtgtcggaaccgccagcaaggcaaggatagcttgggcactgttgaacggacccaggattccgaaggctccttcaaactggaggatcctaccgaggtgaccccaggattgagcttctttaatcccgtctgtgccacccccaatagcaagatcctgaaagagatgtgcgatgtggagcaggtgctgtcaaagaagactcccccagctccctccccttttgacctcccagagttgaaacatgtagcaacagaatacctagaaaacaaggctccagggaagaaaaagaaacgggctctggccagcaacaccagcttcttctctggctgctcccctatcgaagaagaggcccactgaagttggagtcatcatctctacccccagtctggcttgggagatgctttcaggttgcagccagaaggggttttttaaatgacttccctggatttcaggtttcttgctgttgaaaaaaggaacaaagcgttactgaaaagaaggtaacctttgttggatgtgggccttagcctccaggtccagactactactctatgttctccagaagggtgctaagtcacctactgaagagagaaccaactgactttcctattgactcatcaggaaccagtcctcagtctggtcaagttgtttcttatttgtgagcagttcaggctatctcctgatggggatgaggccaaggctttcttatcttttggttgtctctgcttaatggaggagcctggcctaggatggaggcctggcttagatctttcattccacctcaggaatgaggttgtgatctttcctgtcctgaccctctctgaattatgtttcaatagtactcttgattgtctgccatgttgttgaagcaaatgaattatttttaaatgttaagtaagtaaataaaccttagcccgtctac

SEQ ID NO: 18967 - protein, 535 aa, Homo sapiens [sequence omitted]

SEQ ID NO: 18968 - DNA, 2551 bp, Homo sapiens
agtgctaggaacctgcgcccggctgagctgagcgaggcgagaggagaaagcgaggcccggggacgggactgagagctctgaaaggagggaggcggctcccgagtactccgcgccgggcaggccccggcctcgcctgttcgcccatttttaaggctcgagttagaggccacctcctccgagaagccttcggtgacaccacctctcccagacggttcccctttctgattcccacagcattttccaaccattcacggtcagaaccactcaccaggacgtgttgtcaccattttaccgctttgcctcgtctcttaactagacgaaatgggttccttttggctctttggaaagggaggctgtcttctatttatttccgtggtaatcccacctcccacaacaagttccattctacagcaatgtcttttctcttgctgagaaccattcaagtctaagttttctgtcctggttgctcatctcgcccacttgcacagcccacctgtgtggccgactcaggattgacccacctgctctcttcaggccatattcccacgcagaagtgggtcccactcctcaggcctctgtgctggccccgtctgtggggttagcaagcagccctgctctccatttccagctcagaagcaactggatcgttacctcattggtgacaacttgactgtgctgcccagagctgataagaaacatcacccggggaagaccagctgcctcttccttgcttcctaatcagggtggaaatactgctaaatatatcacaactctttgcaagcatcgttgggtaatgatcgggacatctttgtgggttccctatcattttctcacaaagttgagcctttcaaggtcagttctaggccagccagtctgggagtcattctttagaatcagaagagaatttaagaagaggagaagataagattgtctctaaaacctgctaatgagaactacaggaaggtggggatgctagctacttttaatatttctggtttgaaccccttcctccaccccagaatgaactgagagtaggtacagaaatagataatgcaaagacggttagggttgagggtaagcagaaaactacccatctagaccgaaggaaggcttgctaacatatcagtaagcaaacagctttctaatctgcaggtaacaagttttacatccctgaggacactttttgagataggactttgtttgtttgtttgtttgttgttttttgtttttttgagacagagtctcgctctgtctcccaggctggagtgcagtggcatggtctcggctcactgcaaccttcacctcccaggatcaaacgattctcctgcctcagcctcctgaatagctgggattacaggtgcatgccaccatgtccagctatttttgtgtgtgtgtgtgtgtgtgtgtgtgtgtgtgtgtgtgtgtgtgtatttttagtagagatggggtttcatcatgttggtcaggctggtctgaaactcctgacctcgtgatctgccctcctcagcctcccaaagtgctgggattataggcgtgagccaccgggcccagcctggggctttttgagaccctattgaaggctgaggaagaatctggaagctaaagagtaacccattccaccacctgctctgaagacagaagaagcaaaaaaagattaaattgtacaaaaagcacttaaattagacaacagaagaatttcctgatacaaagtgggtgtctaagatgtgttaaacaagatgcctgctccagccaggactcagacactcctggatggagagcatcttcacagtttgggataaaagtgactatacagagtggtggagtgaaggctgcaggcccctccccaaggtggcatctaaccccggaggtatcaggacctcagaggctacccacatgatttccagctgatgagcagaaatagctgtggcaggtgcaggcttcacttgctgccaccaacatgggagctcaccaaacacccagtggccaaaagaaccagggtctctctaagccctgggctcaccgccaggcaagcttgggtgcttgggagggccgtcgttcttcacagtgcagcccctggatttcttctcaatttactcaactctctctcttgaatcccatctgtgcagcttagaagtcacaaattagaaccccccaaggcaaagctgaccatagatacaaatggttttgtctgtatagtgtttaagcacttaaaaaattcattgtgaacatttaataattagaaagtgtcaaaatgaaaatatctatagtttctctctaaaaaccagaagatctgttaacactgatcccacacttctatttggcaatgactggcccctaagacagggggtacgtcctctagctcaccacagtctccacctttacctactgcatccctgctgagacaaagtggtacatgccatttattaaggatgaatgctgttttttttaattatacttaatcctcatttgcattacctgccttcattctggaggtatttgagtttgcatctcctgataaagaataaatctcaaaattgtcatctctaacttc

SEQ ID NO: 18969 - DNA, 2150 bp, Homo sapiens
tggtcttgcacaagacttcagatagggccacaattatgggagctggaaagaatctggctcccttaccaccagtgggtcctttcccctgcctcacaggcatgcacatgctctctctgtaggtaaaaagtacagcatctggcttagcttcagatacttccagttttctaaagaccagtgctttgaatgctttttgttacttaggtaagctccatcaactgtaaaataagtattggtggatttatggatttcaaaaggcagaacaactaacatactgaattcctgattccagtctatgttctactggagttgtcagaatgccaaatgctaacgcaaacagtgcttttttcttctaaaaggaggaaagagggtgggaatgagaggatgaattcctatcagtttaggaggatgttgccattgggagttcttgcgtaatttgagattgtaaaacctagaaggtttcttgtctttgttatgtaggaggaaacaggaattcttggtttaacttaggctgggcctgggaggagtttgctgtttacaatgagatctaaccccttattggagatgattttaaaaatctctggccacctctatggccatctttggcaagatctgcatttggaatttaatagcaaccacatttattaaagcaaagaaatttccctcatttgttgtcccatgtagtccagtagtatgatatgcggggacatttttggccttttgtccctcccgggtatccctgggtttcctcagaatccttcacaatcatccttgcaagaattacagcataatgcggctgcgcagtcagcattgttacagcaggtccattcagcttcggctctggaaagctatccagctcagcctgatgggtttcctagttatccttcagcgccaggaacaccattttctttgcaaccaagcctgtcccagagtgggtggcagtgaatacttttaacttttattctccttcagagcaacatcagaattgcctgagaactgcaatgaacaatctgacaaatgtgaagctggccaaaagtcggaaaatgagaatgagggtaatcctggagaaattgtgacaacaatttgaaaattgtggttgcattttaaagtgtgaacactcccctatgtaaatatgctggcaataaattgtatggagaatggtatttaaaaagtgtttggagacttttcacctgtcctataaatttgaattgtgtatgtgatctacatagaaagaatattaaagagtaggttgaactctttatagccgaatacagccttaaatgcttgtatagcatccactggcagaagtaatagttgtgcctcagacttgggggttgcatgtggccctgggggagttactacccttggtatgcatgagcggttcctattagcatcagtgggaactcagtactctgtatgtatccacaaaagggaacttgagacccacagttattcttaatttctgatattaacaaccgtacatactgctgaatttaactcaaaatatttcaggtaagtgaaagtggtgcttaatgtagactatagaatgactttcaggtgttttcaactgaaagtatatatccagaactgcatccttatagaaatacaagtaagacttaggataatttgccttcaaaacagttttcctaatctcagcagtatccagtgagtgaagaacacttgactgactcttgggccacctctgttacttactgtactatggaagctcctggtgaatgtttacaattgtgggatgtagtatttctatttgtactttaagtcaaatgcttatatgaaatatgtgacaacaaatagagaagactggctctgttagtaattatgcagtatgtactctatttaaggatctgtggtagtataacatgagtgaatgtcattaattttgaagtaataactgccacatgtgggaagtaggggagtaaggagaatgaattccaatctgtgattaaaagtgtaaactatagactctactgtagtacatttcaggatctagaagttttacttttataaagatggtgtccggaagatgttgctaatgtattttacttcaacatagggaacaaactttttaagtatattaataaacctgtatggttagtttttaacagttttttaaaataaactatggatatgac

SEQ ID NO: 18970 - DNA, 2335 bp, Homo sapiens
  CDS (119)..(442)
aaacaacctaccctccttccccattttctgtggtccaactaccctcggcgatcccaggcttggcggggcaccgcctggcctctcccgttcctttaggctgccgccgctgcctgccgccatggcagagttgggcctaaatgagcaccatcaaaatgaagttattaattatatgcgttttgctcgttcaaagagaggcttgagactcaaaactgtagattcctgcttccaagacctcaaggagagcaggctggtggaggacaccttcaccatagatgaagtctctgaagtcctcaatggattacaagctgtggttcatagtgaggtggaatctgagctcatcaacactgcctataccaatgtgttacttctgcgacagctgtttgcacaagctgagaagtggtatcttaagctacagacagacatctctgaacttgaaaaccggtaataaaatttgaacttgcaactgtgacaataatggcccaagcataatcttaaaagttagtgaacatctttggctgcatattttcttggggctagtgtgtgaggaaatttgggtagggtaacagcaaagcattgagtcactgagtgatctcttgggtaccactaagcacccttttaaaagttctctgtttctactgttcctaggtattacaaaggccatcgagatttatgaaattgcttttcaggctatcattaattatttcttacagcatttttgttagcttggtcagtattaccatcagtctttatagattggtcaactaagaaatagagattatgagacagttgaaaagtcaattcaaatataataaataccatcaattcaatccagtagcattggaagttttctaaataatggaatttaaaagtatacatttaataactttgaaataggaaatatacaaaaaagcttataatatggacatctaagagctcaaattcaaaaaatatggtagaattggtgaagttgaaactcattttaagaaaaagcatgccagaaatcaggaaggactgaccgccaagccccgtgaactactctaagcacagtcacagcacatcagttcacatgcagagtgttgaacaacgctgaggacaacctatgagctggggaggaaaatcattgaacttctgccactgtcagtagatgactggtgagaaaactctgagaaggtggtgctttaagaagcttagaagctgactgctgttaacactctaagcttgtgtgtagtcacttctcattggcctttgcaaatcttcagatggcacacccccactatctgtctttcctaggaatttgtggtactctttttcagtagatactatggactattttcatttttctgagactactttattaagaatcttttttgaacacctactagctaacaatacacattatgtaataaaacagtctcctcatagcacctcaagaatacaaagttgactataaattttcctcatatttgtattaacattatggtttatttctagcagtagatattgcatacctagtagatacaaaatgccaggtactgtggatgattacatttgagtccatgtggtttaggttctcaaccatttgcaactaacatttttgatatggtgaagtttggtccatcttgctctgttctctctggcatgtaatgggttggtaccagtgattttactcttcttgcgtgtgatataaatctattttaaatgaataatttttatctttgctttcttctccaagagaattattagaacaagttgcagaatttgaaaaagcagagattacatcttcaaacaaaaagcccatcttagatgtcacaaagccaaaacttgctccacttaatgaaggtggaacagcagaactcctaaacaaggtaatattattattttgagaaacggaaagtctctcatcctgtcctgtcattgcctagggtggagaaacagaagtggaaggtttgtttcaggtcctctgaggataattagtccattgcagtagttttacttgatggtaccccatgggccagaagagggcatacttaaccttctagagagcctgaagtagctcctgatcacaccttttcaaggtaaagtgaagagcatgaaattttggacagcgtttattgatggacatttaaagtttgtgatctgcggtaacaaggagaagggtttttaagtttataaaaattatttatcaattagccgggtgtggtggtacgtgcctatagtcagagctactcgggaggctgaggcaggagaattgcttgaacccgggaggtggaggttgcagtgagctgagatcacgccactgcactctagcctgggcgacagagcgagactccatctc

SEQ ID NO: 18971 - protein, 108 aa, Homo sapiens
MAELGLNEHHQNEVINYMRFARSKRGLRLKTVDSCFQDLKESRLVEDTFTIDEVSEVLNGLQAVVHSEVESELINTAYTNVLLLRQLFAQAEKWYLKLQTDISELENR

SEQ ID NO: 18972 - DNA, 1900 bp, Homo sapiens
tgtgtatggccagcctggacatgaactcagtgatcatctgggtcaaacagctcactgtgcaacaggaaagttgaggaccagggtcacacaaaattaaactgtattcacagatgatcccctctaaatggtctgagagatcatttggtccagcacttcccattcctggctgcacctggaataaccagcttttaaaacatccttctgcccaggctgcaccccaaggattctgatgttgtgggtctggggttggcctgggaacgggtgtttcccaaagccttctcaggtaatgttgaaggaccactagtgaaaataattactgatgtagtctgacatcctcttgttctgcagaggcccaaagggtaaacgatgttccctgcttactgagctgggtagtagctaagcatttggggaagttccggtgccccagctctgaaggacccctcttccatgctgacttcctctgttcactccaaacccctgggtgccacaggtcctgacatttcattttttccagtgccattcctgtgtggaaccatggtggtccccatctttacaggaggcacctgatgtcaaatgaatctctcggagttttggagagagaagcctctttgaacaggaaggattataagaaagggaagctcagctctaaggcattcaccattcactttgccctgggctagtcctttagaaagatgtgtgttcctattacttcaaaacccctcaccttgagatccctctgaaaccagcactggctgcaggtgtctccaatgaggagaagagaaaatctccaggtactagaggactccctctatgggcaacttgtatcttatctacctgtggctgagggctcgggaatccagtaggtatctatttctctccgcaccagctgccccttctctagaacttagttccctttccctaaggttctcctaactttcttcttactgcagtaagagctctgcttcttgccttggtgcagttactggaaatgctcaactgtgattctgacatcagcagctgagaaccgacttgtaagttccttggcttgtttgaagatctgtaagtgggaattaggaggtcagcgttcaggtcctggtttggcttcctctaagctgtgtgacctgtggtctctgacttaaccactggggcctcaggggagagggtttgggggatggttactctcaatgtccccatctcatgggctgtcatgggaccaggtgagacaatgccgggagaagccgttggctgaggtcagaccacagtgcacgggtcagcatggttaggaggagctagaaagtgagagatgtgagggattagtgcaatcaaggtcattcctggaaaggtgcttttattatcatcattcacactgtagatgataaacagtgatggagttagcaaaccttttcatgcctgtgacctcactggagttctttgatgttgggacttcataagtctgccaaatcctgccacttactgctttatgaccttgaccatttaccgcttctctctggacctcagtgttctcaggatgcaaaaggagggtcaggggtaaaatagcgactttcgaactgtcaggggtaaaatagcgactttcaaacttttcaaacttctgggacaagggtgaagggcaggactctgcctctctccttcccttcaccttattccacttaaattgtgtgattctacaagcttatgtttaaaggaatatgttcctccattacaaagagtttaaatggatatggactgacattgaggagttattgttaatcttgataggtgtaatatgatattgttgttatgtttttttaaagatcctaatttgttagaaatgcatactgaagtacttgtgggtaaaattatgttttgtctattttgtttgtttatttgtttaaaaagctcc

SEQ ID NO: 18973 - DNA, 3221 bp, Homo sapiens
  CDS (134)..(1369)
cattagcttccgcagtgagagccgccctgacatcctcgccccccgaccctggtccagaaatgccgccccctcgagcacgaaacggagagatagcaagctgtggagtgagaccttcgatgtgtgcgtcaatcagatgcttacatccaaggaaatcaaacgtcaggaggcgatctttgagctttcccaaggagaagaagacttgatagaagacttgaaattagcaaaaaaggcctatcatgaccccatgctgaaactctccataatgacagaacaagagttgaatcaaatttttggaacactggactctctaattcctctacatgaagagctccttagtcagcttcgagatgttaggaagcctgatggctcgactgaacatgttggtcccatcctcgtgggctggctcccttgcctcagctcctatgatagctactgcagcaatcaagtagccgccaaagctctgctggaccacaaaaagcaagatcaccgagtccaggatttcctacagcgatgtttagaatccccctttagccgcaaactagatctctggaatttcctcgatattccaagaagccgcctggtaaaataccctctgcttctccgagaaatcttgaggcacacaccaaatgataatccagatcagcagcacttggaagaagctataaatatcattcagggaattgtggcagaaatcaacaccaagactggtgaatctgaatgccgctattataaagagcggcttctttacttggaagaaggccagaaagactccctgatcgacagctctcgagtcgtgtgttgtcatggtgaactgaagaacaatcggggcgtgaaactgcatgttttcctgttccaagaagtgcttgtgatcactcgagccgtcacccacaatgagcagctttgctaccagctgtaccgtcagccaatccccgtgaaagacctcctgctggaagacctccaggatggagaagtgaggctgggtggctccctgcgaggggcattcagcaacaatgagagaactaaaaacttcttcagagtcagtttcaaaaatggatcccaaagtcagacccactcgctacaagccaatgacactttcaacaaacagcagtggcttaactgtattcgtcaagccaaagaaacagttttgtgtgctgccgggcaagctggggtgcttgactccgagggatcgttcctaaatcccaccaccgggagcagagagctacagggagaaacaaaacttgagcagatggaccaatcggacagtgagtcagactgtagtatggacacgagtgaggtcagcctcgactgtgagcgcatggaacagacagactcttcctgtgggaacagcaggcatggtgaaagtaacgtctgacagaagcatgtgcacttcgggaagcaggcctgcatcttacctgtacagtatttgcattccacagatggaacggtttggagaagcactttttcatacttttgtgaaagtatacatgttggcccagtctctcgtatctgtacctttgtccctagtactgtaactgccaatctgtctgtgtaagctggaatctgtggcaactattaccctgtgttgtatttcccaagtgtctggatggatggagaggtactcaaacaagttactttcagttgtcctgctggattttaaaaaaatagaaaaagaatctcaaaactactgttttacatagattgtttgaagagtccttcctcttgtgcttctgtaccactttcccagctcttagatgtggtagctaaaggcacggaatttagacggccttgtaaatagggcatgaggaactcatctgtgtattgggatggtattagagagagaatcaggaaagaccaactcatgaagtgaacttggtttgatcttactcaactagaaagcttgaaaacatccctggggattctgaaggcttaattttgcaaaggaggatgcattgtctgaactttgcaacttcatccagtgcaagtttgatgcaagaatgtattaggacataaaatagaggctgaccttaaaagggccaggacagaagcggctgccagctctgaatctttaactgaaatgcacatggcaccaggaggtgtctctcatagttggttgctagcctaaaacatcagaatagaacccaaagggcttaggaaggcctgccaggataacaagaaggccctgtattcattgtgtttcatctgcctaggcctactcattattttagagaatgaatgaagcaacaaggaagagagaccatgactctatcgatgacactgtttatagaaacacaggagaggaagaatttggaatgaaaagcacttcgtcagaaccttctgtgggagccattgagagaaaagcatggtccagtgccttctgagaaaggccagagctttgggctttcctgctctgcttttgggtcgtcaatttgccatctctggttctgtgctataatcagaattgtaattatgttctccagaggccaatttcattaactctgattaattagaatcagctagccagattagtaacctctttgtccagccttgatttacagtgcagggtaaagtgcagaccttaaaaacagctaagtacctagaagagctccctgcaagtgtaaatattaaggatgacctgtgcaaaattatacccacaccagcactagtggtaattattctaaattattgccaaaaagttttttttaatctgtctttcaagtttacagaaaagaaagcagtaaatgcattgatgtcattttattatgtacatatatcatgtgcattcaagctgtgtgacaagatatatcaatataaaaacaaggtatatactttattattttttgaaaacaaggatattgtgatcaattttaccctgtaaaacatatttctgtatttataggtcttaaacatgatgaattttttctattacaagtttatttaaaactgctttctcaagtcgttattgatacagcaagtgaacctgctgcagacagaagcagaggaaagccaagaacagcctttattggtgaagaaaagaatgaatgattctttgtaggcgccatcagccacttttagaagccatcagccagtgtgttgggaaaagaggtttgtcaagtgttggcctatgggaaggtggtcaatgaatgttttgatgaaatgaatgtttttgtataatggccttaaacttttctggaagtatttcaaataaattacattattaagtc

SEQ ID NO: 18974 - protein, 412 aa, Homo sapiens [sequence omitted]

SEQ ID NO: 18975 - DNA, 1900 bp, Homo sapiens
tttcctaagcattgaaatggcaagtgcaaccaaaagtaggtatattcgtgacttcttgtttaggtctctgggccaggaaattcatactgttacatggataaggttgggattggggagagggaacagttgggactagaagcaaaagtgattctgggactaaaataggaagcagatgtcctttcccaatgtgtgttgctgtcttcacctgaatgcatttgtgtaaaaatagcggagggacaatgtgaacatttgtatttggaagctatgaatttactctgaagtttgcagttgtttccaatttgtgagctctaagagtttctgcctgtaagaactactctccttttattttgatttttaaaaacctgtctgaatttcacactcttagagcctggaagagccctgaaaagacacaagtcttgcctggctactgctttttaactttgagggctctatgttgacagactgttatctcctctgggtgacctcaaacatctgaaaagaaagatgttgcctgtgccaattccactttttccagctgccccttgatgaacactcccttataccagaccactctaggacttctgactggtgtcatcaagtcctcagaaaatattttaagttattttaagttattaaggaagggatgatttggagacaaggagtaatgaaagatgggtaaaaactggaaaagattctggtgctaagtactaccccttcatcttccatggatggtcattacctttcctgtcctcctgttctatgaacacacacacacacacacacaccccacatttcaataagtcttcattgttctgggtccttacctttcctgtcctcctgttatatgaacacacacacacacacacacacacacacacacgcacacacataccacatttcaataagtcttcattgttctgggtccttacctttcctgtcctcctgttatatgaacacacacacacacacacacacacacgcacaccacatttcaatgtctgcatggttctgggggtaacaaaggcaagaagttaaagtaagaccacatttgagtattacttactctgtagaatcaaaacagagtagttaacaccaattatgcaaactacttttttttccagcagaaagggagctgacatgatcaaatccatgttttcaaatgaactgaaaaaggcatccagcaccacttataacacatttatttcagttccaggctgacagccctggggcatctagcaggatgcataattgtcatctggtgagagttgggactttgctcaattttaataccaatctctcctgattgtaattacctccactactttcatgatccccctacaatatttttttaaatgatatatttattcactgaatcaaatgtcattaatgagttatcttctgtggaggatgactgttctctttgttaatgttcacaatcaagatcttgggctgagaagaggcccttcacccaaggagtttgaagtatcacagcgtgtgggaaggtgggaaccaggatacccattcatttccaaccgagacacagagaagtgagtcacagaatttgagcctgctctcttgactgcccagccagagacactgatttctgtaacctcttcacttgatcctgcctcttaagcattaaaacattctcctaaacctctgagtgttttgtgggttctgggtgttttgtacattttagccaagctaaccacttgtctgcaagtactgactttcctatgaattctttgaagattattgagtcagaaaggaaaaatatagccccaaattcccaggcttttaatgcattacattaactgcctattgaaatgagaagttcttcacaaacttgtatacccactaacaagattgcacataaacatgcattaaagtatatactaag

SEQ ID NO: 18976 - DNA, 5020 bp, Homo sapiens
  CDS (3393)..(3902)
ttttcatgcttgctccctggcctgaatctagaaagtaaaactttgctggaatgaagttggggttgaaacagtttcggtttgtaaccatactgtctctgtctcatctactcagctctgcctttgtaatgtaaaagcagccatagatggtatgtaaatgaatgaacatggccatgttctgatagcattttatttacaaaaacaggcagtgggctaaatttgggctatagtttgccaacccctcttctaggcaaagaactgcctgagcgtaggaagctggactgaggttctctgctagtgtgtgaacttgtggatgccaaagccaatctcttcccttcatgtcagacactttgcaaatgttacctcttttagatctcccattaactctaaaaggtggagggtgctattatgcttccatttcatacattgttctaagagattatcacactactagtaagttaggatagtaggaatttgaacttcaggtctgtcagaccctaaaaccccatgccctggaaatggttttctaaggctggcctgtggttcgttggttgatttcaattagaatttaagaattttttcagaatacatctaggtgtaaagatttttttgtcaatattactccacaaactagattatttcttttggcctgataactcaggaactttcttgtattacttctctcccttcttactggtttcttctttggactctcctgttgcacaggtattggatctcctggacctatccagttcctttcttttctatgctgtcatatttttcatctcttattgctctgtgttctgggagcttccaggacagttgctctttcacacaactaatttggttttcagttatatcagttctcctatttagcctttctttttttggaggcagggctggggcagactcatgctctgtcgcccaggctggagtgcagtggcctgatcacagctcactgcagccttgacctctgggactcaagcgatcctccagcctcagcctcccgggtagctgggactataggcatatgccaccatgcccagctaatcaggtgtttgtttgtttgtttggtagagacagactaccagagtctcgctaagttgcccaggctggtctcaaactcctggcctcaagcagtcctcccaccctggcctcccaaggtgttgggcttacaggcatgagccaccgtgcccggccctgttaagcctttctatctagattttttccctcctaatcatgttggtgtttttttgtttgttttcatttttgttttgttttgttttgagacggagttttgctcttgttgcccaagctggtgtgcaatggcacgatctcggttcaccgcaacctctgccttccaggttcaaacgattctcctgcctcagcccccagagtagctgggattacaggcatgtgccaccacacctggctaattttgtatttttagtagagatggggtttctctatgttggtcaggctgctcttaaactaccaacctcaggtgatctgcctgcctcggcctcccaaagtgttgggattacaggcgtgagccaccatgcccggccagtttttaaagaactccttcttactactcagattactcctttttaaatagtggcttttaaaaaatatcgatgtagactgggcacagtggctcacacctataatcccagcactttgggaggctgaggcaggctgatcacctgaggtcaggagttcaagaccaggctggccaacatagtgaaaccctgtctctactaaaaatacaaaacttagccaggcctgcagttccagctactagggaggctaaggtgtgaggatcgctcgaaccaggaggccgttgcagtgaaccaagatcacgccagtgcacttcagcctgggtgacggagtgagactccgtctcgagaaaagaaaaaaaaacgcaatgcagcagtggctcacgcacataatcatagcattttgggaggccaaggcaagaagatcacttgagaccaagagttcaagaccagcctgggcaacaacaagaccccctccccccatctctacaaaaaatttaagaaaaaaaatttttttaaatcaatatggcatcctgttgcacaaattgcagtatattttaaaagatttattctgtttcttttgtcacctccatttcccagggctactgttgctctgtttgagctatgccctggaccattgagtggcttagactgtgctcacaataggtgtcccttcatcccttcagaagacaaacatggacatacgtcctaaaccaggaaggggttcagtgatggctcaggaaaatcggggcagggtgcagttatcctctaggcgagctgccgttttctttttcctttcctctcttgtggttgcctagaattagcttgggcactactatggtttttttctgtctgcaggccccaggagaccttctgtggacccaatatacttaacaatcatatgcagtgtagacctgctctggtgtcaattctaaccaaaacaaaaaaaaaagcatttatgagacactcagggaaattcaagcagtaactgaataatattagatgatactaaggaattagtgttactttttaaattggataatagtattatgtttatgttaagaatcttgatctcttggtgatacatacctaagtaattgcatttgaaatgctaggtctcggatttgccttaaaagaattcagttagaatggcgtgggtatagaccagtggttccttactgggggctatttcccccacaaaggcatttagcaatgcttggagatacttttggtcatcaaaattgggaatttgctacagacatctaataattagaggctagggatattgttaaatgtcctacagtgcacatgacagacccacataacagagaattgtatagcccaaaatgtcattagtgtgacgttgagaaaatatatatgcagcatatgttttgtaaaaaagaagcccttaccagtctctgtgacaaactctctactctgtgtagagcactgtttttccagctgagtctagatgggaagccccgcttgtcatttgggctgtgggtgtactggtgctgggttggcaggcctttgcttaagtaccatcctggtacctcaaggtccactttcaaccccagtcccaattccctctgagcttgaggtgtttccaggcccaaactggtagaactagtacttagttttcagctggaggctctttggctctgtttgatctcttggacatcgagtctggtctgttttgtcttccagaaatctctcaaagattctgatctacatatgccaccgtttgctgcctttcagatacgctgttgattcattagtatttttatatttcttctaccatgtcagtgtgctttgggggaagatgaagtagtcgtgatgcccatcgcccgagagttctctccagacctagtcctggtgtctgctggatttgatgctgctgagggtcacccggccccactgggtggctaccatgtttctgccaaatgttttggatacatgacgcagcaactgatgaacctggcaggaggcgcagtggtgctggccttggagggtggccatgacctcacagccatctgtgacgcctctgaggcctgtgtggctgctcttctgggtaacagggtggatcccctttcagaagaaggctggaaacagaaacccaacctcaatgccatccgctctctggaggccgtgatccgggtgcacagtaaatactggggctgcatgcagcgcctggcctcctgtccagactcctgggtgcctagagtgccaggggctgacaaagaagaagtggaggcagtgaccgcactggcgtccctctctgtgggcatcctggctgaagataggccctcggagcagctggtggaggaggaagaacctatgaatctctaaggctctggaaccatctgcccgcccaccatgcccttgggacctggttctcttctaacccctggcaatagcccccattcctgggtctttagagatcctgtgggcaagtagttggaaccagagaacagcctgcctgctttgacagttatcccagggagcgtgagaaaatccctgggtctagaatgggaactggagaggaccctgagaggagacgggctgggcggcgacccccacagggctctcgagaacagattctcccctccagtatgggccctggctgtggcccccattcctcaggactgcacagaggaggactggctccggctccgtcgggctcacccttaaccactattcctggctctgcaaaccccagactttgcacacagccccaggctccacacagaaatgtgaacttggcctcagacaggctggcccttcctaggctctaggggctaggggggagtggggagccaagaggtcccatattcctgagtgcaggggtagtccctctcacctgcttcctcagacgactctggaagcttccctctaccaccgggcactgagacgaagctccctgacagccgagactggcagccctccatctggtccgtaccctcgccagaggcccccctacatcaacctcctggcgatgccctggtggagcagatgggtgctctgggagtcctgtgcttcctgatccaatggtgccaaacccttcatctcccccagaagcgcagcatacccctgggacccctcggccactgcccactcggggagccttctctgtttctggggcctcccccaccatagctctgattcccaccccacataggaatagcctgactgagggggaaggggtgggagagaagatacagacatggaggaggggaggctgctctggcaaagtcttcaaggcttttgggggtccaggcctggggtcaagaaggaaaatgtgtgtgagcatgtgtgtgagtgaggcgtgtgtgtgagcgtgtgtgtgagtgaggcgtgtgtgtgtgtctttcctaggacccaccataccctgtgtatgtatgcatgtttttgtaaaaaggaagaaaatggaaaaaaatctgaacaataaatgttttatttgcttt

SEQ ID NO: 18977 - protein, 170 aa, Homo sapiens [sequence omitted]

SEQ ID NO: 18978 - DNA, 4889 bp, Homo sapiens
  CDS (351)..(1049)
aggtatttactttttgttgaattttaagggacctcaagtgaaataataatcggtgaattcaggatcaacctttatgtccagagcgtttgttccgtcgtccatttcttgtctagagtagtggtatgagctgaaaacattgctaagtgatcaccacatattgttgatgtaagggctactggttattacaagagatttttatgactcctgctgtgggggtgccctttctacccggctgagcttggtgggagccaaggctgagtcggatgtatctttatattcccagttctcggtggaacttaaaatgctgtgagacaccagacagacagatactgtgaacttggagctctctaatgaagggataccaaagtcttgtattcaatttttttttccttaaattgtcagccgaaaatgagagcacacctattcagcaactcctggatcacttcctccgccagcttcagagaaaagatccccatggattttttgcttttcctgtcacggatgcaattgctcctggatattcaatgataataaaacatcccatggattttggcaccatgaaagacaaaattgtagctaatgaatacaagtcagttacggaatttaaggcagatttcaagctgatgtgtgataatgcaatgacatacaataggccagataccgtgtactacaagttggcgaagaagatccttcacgcaggctttaagatgatgagcaaacaggcagctcttttgggcaatgaagatacagctgttgaggaacctgtccctgaagttgtaccagtacaagtagaaactgccaagaaatccaaaaagccgagtagagaagttatcagctgcatgtttgagcctgaagggaatgcctgcagcttgacggacagtaccgcagaggagcacgtgctggcgctggtggagcacgcagctgacgaagctcgggacaggatcaaccggttcctcccaggcggcaaggtagtgctctgtggccaccgagagagggtgccacgtggccccagactctctgtgtgcctctccttctgggttggtgctgtgtgatctagcacagccaccgggatccagaggtcagcgtggggccctgacgggaggtccggatcagacacacataaggctggtctcttcagtcggggtccaggtgcctctggcagggctgccgctggtgtttcatgcatcgtggaggccacgtggtcactgacctcatttccttgatggaggccctgctgcaggctaatcctttctcttggagtgaatgctgacttctgtgtctctgtcactgggtgttgacgtgaggcaccgcccttgttattccagtgggggtgctggtgttggatccgacagatggtccataataggccaccgactgtgttcacgtggctcctgccacagatggtctttgtggtggtggggcccactcagctgaccacgctctcctttctggcaggagacgttctagacccagtgtcttcagtggaaacagagcacaggctgtctgcagtctcaggcttcctagcagccctgataagagaagtagagcaatgcaggtgacattaatccttgcaggtttcatttcacctctatatccaacattttatctcaacatgtagtctgtagaaaacgttaatttgagctttatgggtttttttcatattaagtcttcaaaatgcacatgggatgggatgtaaagaacgctgaagtgggggcatttcagaggtgtctgctgctttttgcctgtgcctgctgggaagttgcagtgctctgtgtggcttgcgtgttgcgaggttgcggtctgcgtggctcacgtgttgggaggtcgtggtctgcgtggctcacgtgttgggaagttgcagtggtctgtatggcttgcgtgttgggaggttgcagtctgtgtggcccgtgtgttgggaggttgtggtctgcgtggcttgtgtgttgggaggttgtggtttttgtggcttgcgtgttggggggttgtggtctgtgtggctcacgtgttgggaggttgtggtctgcgtggctcacgtgttgggcagttgtctgcttggctcacgtgttgggaagttgtggtctgcgtggctcatgtgttgggaagttgtttatgtggcttgtgtgctggaggttgtggcctgcgtggctcacgtgttgggcggttgtctgcttggctcatgtgttgggaagttgtggtctgcgtggcttgtgtgttgggaagttgtttatgtggcttgtgtgctggaggttgtggtctacgtggcttgcactgtagttcttttggacagccttgctctgcagtctgtgtttcagccctggaattgccacattctccaagaagccctggtttcttgactagagagccttgtgtagaagccaggacctgggttctgggtgaagccctctgcagatagagctgggagatgcctgttgtgtgtgtctgcaccacatacatggacactgtgcagagggattctgttggcacctgtgtttacatgggttgaaaactgtttttacacggaaacttccagttccctcgtgccccgtgggttccgcccacttcttccctttcagttttgtatctgcgccgtgaggacttgtctcctaatcttcgtatcaactccgtgtcccattgagctgaccttccgcctctcccccagggccctggccatcctgtgggctctgagactttgcatggatccgcggtggggagctgcccccacacaaacgtccggctcttctcaggccaggtggctgccctgacatggcatgatgtccagcgcatggacgtcacccttgcactggagcccagccaaccgctgcatgacagccctcttcccccttgaaccccaagtctgcacacaccagtgcctcctcttcctggatcctcctgatggcctgtacacagaactggggtgtgggtggtgggtttttaaatgaaaaccagtccacacatgcttgagggctggagccgcctgccgtcagggcagtgccatgctgacctgctgaccgttccattttgtcaaggctcatgagcaattttaaatgtttactcgtgggtgaaggtttttgtttcagctgtaccccctatagcagggccatggggagcctaagaggttctccttggcacctgtgcgcgctctgctgttgccggtgagtctgaaattccagggaatgccgtgaggggccctctggcgtttgttcttggacaaatgtgctttcacccccattaagccctgcttgttggtcttcatttcatttgtgctgcgctgcccctcctgagggacagacgctcaggcagtgcttccttccagatgggctatctgaagaggaacggggacgggagcctgctctacagcgtggtcaacacggccgagccggacgctgatgaggaggagacccacccggtggacttgagctcgctctccagtaagctactcccaggcttcaccacgctgggcttcaaagacgagagaagaaacaaagtcacctttctctccagtgccactactgcgctttcgatgcagaataattcagtatttggcgacttgaagtcggacgagatggagctgctctactcagcctacggagatgagacaggcgtgcagtgtgcgctgagcctgcaggagtttgtgaaggatgctgggagctacagcaagaaagtggtggacgacctcctggaccagatcacaggcggagaccactctaggacgctcttccagctgaagcagagaagaaatgttcccatgaagcctccagatgaagccaaggttggggacaccctaggagacagcagcagctctgttctggagttcatgtcgatgaagtcctatcccgacgtttctgtggatatctccatgctcagctctctggggaaggtgaagaaggagctggaccctgacgacagccatttgaacttggatgagacgacgaagctcctgcaggacctgcacgaagcacaggcggagcgcggcggctctcggccgtcgtccaacctcagctccctgtccaacgcctccgagagggaccagcaccacctgggaagcccttctcgcctgagtgtcggggagcagccagacgtcacccacgacccctatgagtttcttcagtctccagagcctgcggcctctgccaagacctaactctagaccaccttcagctcttttattttatttttttagttttattttgcacgtgtagagtttttgtcatcagacaaggactttgatcctgtcccctttggcatgcgggaagcagccgcggggaggtaatgaattgtctgtggtatcatgtcagcagagtctccaagccccacgaaccctgaggagtggagtcatacgcgaaggccatatggccatcgtgtcagcagagagagtctctgtacacagccccgtgaaccctgaggagtggagtcatacacgaagggcgtgtggccatcgtgtcagcagagagagtctctgtacacagccccgtgaaccctgaggagtggagtcatacgcgaagggtgtgtggccaggctgcagagctgcgtgccgtttgtgtccgagcatcacgtgtggctccagcccttatttctgccagtgtagacacctctgtctgccccactgtcctggggtcgctcttgggaggcacaggcatgggtgtgtctggcctcattctgtatcagtccagtgtgttcctgtcatagtttgtgtctcccaggcaggccatggtaggggcctcgcaggggccattggggagcacagggccaggctggggtgaggagagctcccctgttttctgtttaattgatgagcctgggaaaggagtgtgttctgcctgcccgttacagtggagcgttccgtgtccataaaacgttttctaactgggaaaaaaaaaaaaaaaaaaaac

SEQ ID NO: 18979 - protein, 233 aa, Homo sapiens
MKGYQSLVFNFFFLKLSAENESTPIQQLLDHFLRQLQRKDPHGFFAFPVTDAIAPGYSMIIKHPMDFGTMKDKIVANEYKSVTEFKADFKLMCDNAMTYNRPDTVYYKLAKKILHAGFKMMSKQAALLGNEDTAVEEPVPEVVPVQVETAKKSKKPSREVISCMFEPEGNACSLTDSTAEEHVLALVEHAADEARDRINRFLPGGKVVLCGHRERVPRGPRLSVCLSFWVGAV

SEQ ID NO: 18980 - DNA, 2133 bp, Homo sapiens
gtttaataatgattatccaaccattctcttttcctttgaaatatccataacaaaagggaactactgacttggctttgtgacaagcttaaaataaaacttcaacacatgcttataattaatttttgtgaaaaaatgtaaaacagtcattatagagataggacataaaaatagtagctaacacttattaagtacttgttgcttgtcacatgttatattaaatgcccaaaaactctttataatgaattgggttataatacctctgtttgacttaaaagatgctgatacagtttgaatatttgtcccctccatatctcatggtgaaatgtgatccctaatgttggacatggagcctgctgggaggtgtctgggtcattgggatagatccctcttaagtgacttggtgccctccccatggtaatgagtgagttcttgctgttagttcacgagagagccggttgtttaaaggagcctgcacctcctcctctctctctttgctccctctcttgctatatgatgcgcctgctcttcctttgccttctgccatgatcggaagcttctgaggcctcaccagaagctgagcagatgctggtgccatgcttgtacagtctgaagaactgtgagccaaataaacctcttttttaaaatttaatttaattttttttttttgagacggagtcttgctctgtcgcccaggctggagtgcagtggtgcagtcttggctcattgcaagctccgcctcccgggttcacaccattctcctgcctcagcctgccgagtagctgggactacaggcgtccaccaccacgcccggctaattttttgtatttttagtagagatgggatttcgccatgttggccaggatggtctcggtctcctgacctcatgatccgcccacctcagcttcccaaagtgctgggattacaggcgtgagccactgcacccggcaataaacctcttttctttacagattgcccagtcacaggtattcctttataggaatgcagaacagactaacacaaatgctaagaaaggccgagtgacttgcccaagatcagacagccagtgatgggtagagccaggttttggttccaggcctggctgagtccccagctggagctagctacagctacactcttctgctttgccaggggaattgcagcaggaggtgaagagtgggatagtctgctgggcacggcggctcatgcttgtaatcccagcactttgggtggccgaggcagacggatcatctgaagtcaggagttcgagtccagcctggccaacatatcgaaacccgtctactgaaggtacaaaaattagccaggcgtggtggcacgtgcctgtagttccggctactcaggaggctgaggcaggagaatcacttgaacctgggaggcggaggttgtggtgagctgaaactgcactactgcactccagcctgggtaatacagtaagactctgtcaaaaaaaaaaaaaaagagtgggatagtccctgagaaagggataggtatagggctgtggaaccacagagcacggagagtgttctcccaggtagagggcttgggaagcggacatggaggaagagatagtctattccagaagaggaagtaggagagggactggtggagacagtgagcagcacatgccaggagcagcaggagggtgggcagaggcatagcaaaggcccaggcacatttgaaggtgattgtagagttcgatctgcagccatgggagtggcccccagtcctctgaacagcgcgacccctgtcatccagtgttgtggatcctatgtgctgctacttggactttttaaattactctggattcagagagcacagccacacagtttcatcacttactggctgtgtgaccctgggcaagtcacttcacctctctgagctgaaggtttcctcatctgaaaactgggggtaatgatagcatctccttcttaggattgctgtgaggattcaatgagataaacctcaaattagcacatgcctggcacctccaagggctccatagaaaggtggggtattactgtcttaccgtgtaattgaatggtggcattataacgctatttttcaggaggcttgtgaaaaaaataacttctcattaaaaaaataattttagacttt

SEQ ID NO: 18981 - DNA, 1656 bp, Homo sapiens
ctttgcgggccactcggccaactgacgtcggcctctcctgtctggatgtccagtttctgtggctcactcctcaagccagatcatctgggactgagggtggcctctgggctcctgtagacttccacagccaggatttcacatccctccccagagcctcggaccgaacagccacaagcagccatgagtgtcgtgcctggactaagctggagagacaaaggcgtttgtggcaagggcccagctggaagccctggcaggccagagcatgcatgtgctggcttgcacgagcatactttggtgtttgtgttggggacaccgggcttctgagggactggcgtggctccagggtggggagcagcctggttgaagcgtggccaggcactcactctgttgttcagatcccagctccactgcctgctgtgtccacagtctcctcacctgtcaaatgggaatatctatgtggcgggagggtgctgaggtttccacgagctaatctgcctgctgtgtagtaactagtagcttttcttactgttagtgaacttgttttagtctgaaggaaggcacccatgccccaggtgaagtccagctgagttcagtgaggacgatggagacccttggtcttggcacccttctgccttacactgggaatgcctcaggcttgctcctgctgtgtgtctgtggttgcccactttctgctggtctccgagagactgattcaggtgttcaggagtctgttcgctattacatcacctccttgtgagaaataaagtggagcagcctcatccagacagcaaagcaaggagggagcgtgaggagcagccaggtgagctggtggcatggggccgcctgtgcagaggccggccttgctgcttcatgtggctcagggaggctcagcacgtccgtcatcacacctcagggcagcgagagtggacctggtgccttcagaagcccacccgaggcctgctgctctggcctgcaaaggtggagtcaccaaagctcattacaaagtgtttgcttatttttgtctgccctgcatttttttatttcttgcaaaggcctcagaggatgtgggccccagcccaaacacatcttgttttcactggtagagcttttcctagtgtctgcacaggggtgcttccagtggctctgccatagccccagacaagctgctgacacggcagccatgaggtctgggacaggttccagggggtgcttttggcctgctccagcaggagtggaggctggactggtctccagcaggagtggaggctggactggtctccagcaggagtggaggctggtctgggctccggcaggagtggaggctggtctgggctccaggagtggaggctggtctgggctccagcaggagtggaggctggtctggggagagagctacacctccccaggcccaggtctcacgaaaggagcatcgaagggcaccgaggaaaaagccacttagccctctcctgtcctgcaccattatctgggcccattggttcttgggtccctgtctttctcaacaggcagccccagttggggaattaagttgattctggactggctatgcctaatgatagctgcaatttgaaacccataaagttcgagttcagcaataaagttggggaggcagtgtcaacaccttccttgtagaacggc

SEQ ID NO: 18982 - DNA, 1761 bp, Homo sapiens
gagctgatgtccactaatagaaagaatagaaagatctgattatttcctttttgccagtgtgtagtcaccttggtaaaaggccataggtccctttggaaaaggctgggagaaagatttaccttataaatgtttggcggtggagtggagttcttccacaatagtacctactctccccttcattcaaagagttctgggtctgtaaaccagctcaggtctggtaattgattgaggggatatgactctatttttatgtttcaagttagacttgttcatttgacctacaactcttccacttctacaaagcaagtcagaatttgctagacttcccagctgtttcacttccaggaacaccatgatcaactagtcagcataggtctctgagtcagactattttgactgctgtttcaactccattgtccattatggtaaccacacccgccttgcttttggtggtttattgccaccacttggctgccaccaacctggggcccaattacccccattgcacttaggttttccaacttgatggcagcagtttccacatccttgacatctattctcacagatattcctcaaattgctgtctgtctgtttaaattggaaaaatcatttagttcttttgaagtgtagcgcaccttctcatgggtcatactttgtacttcacctttcagggcttgctgggatttgagtccagttatcagttgataaggaaagtgggatgggggtgggtcctgaagagaatcagtggggtcttccatgacagctgcctcaggggaggccattacagttttctcgggcaaagcagggttaacctgctcaaacatgggttggggggtgcagttgcttcttctgacaaagaagactcgttggaatttaggggttcagtgtccccatcttcgtcatgatcttcccatatgtccccaaagcaattttcaaagtcctattccttcccaatctatgcccccactttaacagcagatactctgcaaggtttggaatttaacttgcattgcaattcagacctcgcaggatgaagattcttggtttggttttctgcagtctcagctctgaggctgtaggagataaggatttctttctaggaaggcatagaaactttcaggtcatttatgctgcatctgagtgggaattcaaatccctcaactccttttctttcccactttgtccagcccaattaggagcaaccagccaagttcattatgcccattagtttgacggaaatgttctacgttatcaaatacgtggtcacccagaaccttgcctatcataattatttgattaggagtatctaatagtgatatttttgtgtatctctattaccacatcacaccgatgactatcagtgctttattcactattggaactagagtcattagtgcttctaaatctagtcatttagagaaccaattccagaaacccccaaaccaattcagagaatttattcttaaaattctgttcctggctgggcattgtcttatgcctataattccagcactttgggaggccaaggtgggtggatcacttgaggtcaggagttcaagacaagcctggccaacatggtgaaaccctgtctctactaaaaaaatacaaaaattagccaggcatcgtggtgcatgcctgtatttccagcttcttgggaggctgaggtgggaaaatcgcttgaatctgagaggcagagtttgcagtgggctgagatcgcaccactggactccagcctgaacatcacagactgagaatttgtct

SEQ ID NO: 18983 - DNA, 2634 bp, Homo sapiens
ggccttttttttttttttttttaggagatggagtgtccctctgtcgcccaggctggagtgcagttgagcgatctcagctcactgcaagctctgcctcctgggttcaagtgattctcctccctcagcctcccgagtagctgggactacaggtgcatgccgccacgcccagctaatttttgtattttttagtagagtcagggtttcactgtgttgcccaggctggtctcgaactcccgagctcagacaatccgcccgccttggcctcccaaagtgctaggattacaggcgtgagccaccatgcccggctgagagtcctcatttctaataagttcccaggtgatagcaatgctcctggtctggggaccacattttgagtagcaatgagatacatctgtgctgtccaataggcagccactagccacatgaggcaatttaaattctcaattaattaaaatagaaaattcagctcttcagtcacacaagacacatttcaagtactccacaactaactgtggctagtggccaatatagaacacgtatagatgtttatagacacctatagacatttacagaatatagaacattttcattatcacagaaagttctgctggacaccaccacttttatcattccatcattaaagagtatgtaaatcttgtaagagggtcaagttcaaagcagggatatcagcgattgcctctcagccttataaggagtttacttgggactcttaggtgatggctgaggactgatctaaagtgattgattctggccaggcgtggtggctcatgcctgtaatcccagcactttggctgaggtgagggggatcacttgagctcaggagttcaaggccagcctgggcaacatggcaaaaccccatctctacaagaattataaaaattaaccaggcacgttggcacccacctctagccccagctactcaggaggctgaggtgggaggatcacttgagcttggggaagtccaggttgcagtgagctgtgattgtgccactgcattccagcccagacaatagagtgagaccctgtctcaatcaattaatcaatgttgattctaaacaccgtcatcagtttggatgaaggattcaaaggcatgtacagtaaataagcatataatacaaaatgagcagcaaaacaaatcagaaaccaataagaataaaacaaatgcaacaggtacaaatagcaagaattacgcttagagatggcaggggtgggggatgggtaaggcacatgaatatgggaaatgactaggaacatagcaggaaaagaccagtaataagggtccacgagttgtgaagaacaacaataaaaatgcttgttaaaagcatcataaatgcagtattagtcagaactgtatctggctctagcctccattttccacctcaaagggaattcacatgagagttgtaaaaatgactacttttttttttttttaagtatttggctgggtgtggtggctcgtgcctgtaatccctagactttgggaggccaaggcaggaggatcacctaaggccaagagtttgagaccagcttaggcaatacagcgagaccttatctctatttttaaaataatataaaaagcttaatattacagttgaaaacaattatgtggcactatggtttttgtttttgattttgagagagggtcttactctgtcggccaggctgcaggacagcggcataatcacggctcactgcagcctcaacctccccagactcaagctatcctcccacctcagcctcccaagtagctagaattacaggcatgagccaccacgcctggctagtttttgtattttttataaagatggggtttcgccatgttgcccaggctagtcttgaactcctgggctcaagcaatcctcccacctcggactcccaaagtgctgaggtcacaggtgtgagccatcatgcccagcatgtgacacatttttaacagcaattaatttctgtagagaacttgaatttgttccttctttccaaatcgtcatcaattcttatgacatttcccagaaacaaatagttaataagctcatgccctaacaaaggctggctgcactagcataccaaaaggtttctgtaccacaaaaagttttagctgatacaaaacttaacagcacattttttaaaagaaagaaaaagagtcacctggttatccactccctttcccagctcctaagatagaatcgtgccgaacgcaacactactccaccagtaagaagcaagttttgtttttttgtttttttttttgaggcggggttgccctcggtcgcccaggctgcagtgcagtggtgtgatctcagctcattgcagcatccgtctcccaggttcaagagattcttttgcctcacccttccaagtagctgggattacaggcgtgcaccatcacgcccagccaattttttgtattttcagtacagacaaggtttcaccatgctggccaggctgtctttacaaaatacaaaaattagctgggcgtggtggcacacccctgtaatcctagctacttgggaagctgaggcaggagaatcacttgaacccgggaggtggaggttgcagtgagctgagatcatgccactgcactacagcctggcaacaagagcaaaactccgtctc

SEQ ID NO: 18984 - DNA, 1643 bp, Homo sapiens
ggccttttttttttttttttttggagacagtctcactctgttgcacaggatagactgtagtggcacgatctcggtttactgcaaccttcatcgcctccctggttcaagcgattctcttgtcttagtctcctgagtagctggaccacacccagctaattttttgtgtatttttagtagggatgaggtttcgctgtgttgatcaggctggtcttcttgaactcttggtcacaagtgatccgcctgccttggcctcccaaagtgctggcattacagctgtgagccactgcgcccagcacctttttttgtcttgtttactgcgaaatccccaacaactatagcatttccaggcacatagtagatgcttaagaattacttacttacaagagcacaaacatcggcgaataaaaagaattacctattgaatgaatgagagttagctggtgcaaaaaaaaaaaaaaaaaagccagtgcagattgagagacctggccatagaaaattacaacgctcagggataaggtatggcaaggaacgttttttgttttttgttttttttttcgctttattgccgaggctggagttcagtggtatgatctcggctcactgcaatctccacctcccaggttcaagcaattctcctgcgtcagcctcccgagtagctgggactataggcgcacaccaccatgccctggtaattttgtatttttagtagagacggggtttcgccatgtttgccaggctggtctcaaacacctgacctcaggtgatccgtccgccttagcctcccaaattgctgggattacaggtgtgagccactgtgcccagcctggcaaggaacttgaggagtgggtggagagaacgctgagatggagttgttttcagacgtttccatttgtcccagatagcgattcccttaaattgtggcttaggcttctgttttctaaaatattcttaggccaggtgcggtggctcacgcctgtaatgccagcactttgggaggccgaggcaggcagatcacctgaggtcaggagttcgaaaccagcctggccaacatagtgaaaccccgtctctactaaaaatacaaaagattagctgggtgtggtggtgtgtgtttgtaatcccagctacttgggaggctgaggcaggagaatcgcttgaacccgggaggcggaggttgcagtaagccgagatctcgccatccattgcactgaccttgggcaacaagagtgacactccatctcaaaaaaagtacattccttaaagtcatcttgaccttagtttatacttgtagttaaattctctcataagaaacaaatctgctgagattacaggcgtaagccaccacacccggccagaaatgctttttaaaaacggttccacccgggcgtggtagctcacgcctgtaatccttcaaggcaggtgggtcacctgaggttgggagttcgagaccagcctggccaacatggtgaaaccctgtttctgctaagaatacaaaaattagcccggcgtggtgatgtgtacctgtaatcccagctactcgggaggctgaggcaagagaatcctttgaacctgggaggcggaggttgcagtgagccgagatcacgccattgcactccagcctgggtgacagaacaagattctatctc

SEQ ID NO: 18985 - DNA, 3874 bp, Homo sapiens
aaggtggactagacaaagttgtatctagacccttatcatatatgtgatttgcaaatattttgattgtgtgggttgtctttttacttttttaatagcgacctttgcagcacaaattctcattttgatgaagtcaaatgtatctaactttcatttggctgcttatgctttcagtgtcatctaggaaccatagcctaatcgaaggtcattaggatttgcacctttgttttcttctaatgattttataacattggctcttatttaggtctctgatacatctgctgtgaatttttatgtatggtacgaagtgggacgggggaggggtgtcccactttaatcttttgcacatggatgtccagttgttccagcaccatttgttgaaaaaactattctttcctcatgaactgtcgtcttgcctctgttgttgaaaatcagttgactgtaaatgtatggatttacttcagaactgttaattttattccattgagctatatctattatgctagtaccatacagtcttgatgactgcatctttgtaatatgttttgagattggaaagtgttcttgggctgagaaatgtaagaattttccatggtgtttgaccttgagattagatcattccagttcataagtatttgtatatgtcttagtcagttttgtattgcaataaaggaatacctgaggctgggtagtttatttaaaaaaaaaaaaaaataaagccaggccgcggtggctgatgcctgtaatcccagcactttgggaggccgagatgggcggatcacgaggtcaggagatcgagaccatcctggctaacacggtgaaaccctgtctctactaaaaatacataaacttagccgggtgtgctggcacgtgcctgtagttccagctacttgggaggcagaggcaggagaatcgcttgaacccaggaggtggaggttgcagtgagccgagatcgcgccactgcactccagcctgggcgacagagcaagactccatctcaaaaaaaaaaaaaaaaaaaaaaaaagaagggggagaaagagagcaaggttaatttggctcatgtttctacaggctgtacaagaagcatggcgcaccagcctctgcaactagtgaggtctcaagcggcttccgctcgtggtggaaggtgaagggtagcctatgtgtgcaggtatcacagggtgagagaggaagcaaggagagggtgtgtgtcaggctcttttaaacagccagctcttacagcacctaataatacaggaagaactcacccctgaaggaaggtattgatctatttatgagggatccaccttcatgacccaaacccacctcccattaggcccccacctacaacattgggggatcatattttaatatcaggtttggggagacaaaccaaaccgtagcaatgcagctttatatttttacatatagtaaatgatggtgataatatcaatgacaggaaagacctcagttgggcattctttaataggagttgatcaccatcttggctttaaagaattttcattaactatactgtgctttcccttgactgaccaactgagaactcaaaccgtgttgatttttgctggtaagtatttgaattgttagttgacagtcaagccagtagctgtttgaaaaacctttctttgggacaactacaaaagcaaaaatataagtacctacaaatgcaaagaaaaatactactacctgaaatcctactgtatatggataaccactgttaatatttgatgaatgtgctttcacttagtggtctatgcaaatgcaattttacgtaaatgctgtcataccatacgtgctgtctttcaacctgcgccctcaagagaacatcattaatatatttgtcattaaatgtgggtctacttcattattttgatgacagcattaaaccactattgaactatactatttcatataatttcattaatagttttttactattgaaattttaagttgtttctagtttatactctcaccaacagaacgtgaattaaagtttcctcatacttgaggcaaagcagagttttgtcacccttttaccatctttgctatactataagcaaaaaataagtttctgttgcatttcttttatgatgactgtagttgaatgtctttcattagtgtcctggccatgtgtatttcctagtgaattacttgcttatgactattgcctgttctttttttccttagtgatttatttttatatatttttagtgttagactgttaatatatgttgcaaatgtgtttctcagtttgccatttatcttggaatcttcatggcagtgtattttcttgtggtgtttttgggtattttgttgctgtccaatatttttgccttcttataaaagtaatcacacttttcaatctttgctgtatgtttttgaactttgtggtcatgcttagaaggattttacccatctcaagtttacataaactttcacttgtattttctcctggtacttttatatgtggttcatatttaaaaacatttaatccatccattataacagcagctttttaaaactgcagaactttttattctgcccaatatgtttgagagatttgtgtcttagcaagtggatttttgctttaaagtcccattgaactagtgctggaatgagaactaatagtgagatacagttttttgtattataatatttatgctcttcctccacatcttcatttggctggctctttctttgttcagacctctgcataaatctcacacctcagaaaggccgcctgtggccaccccatctttataaaatagcctctctctgatcattccgtctaaagaagaagaccacccccattgttctgcatcctgttccctgttaaacttcttagcacttagcactgcctacctcatcatgtttgtttccttgtttatcttatctcccttctcccactagaatgaggactcgatgaaagcgagatttttttctgtcttgttcattgcagtatcccagaacccagaaaagattctgacacaaaatagtcatctataaatatttaagtcagtgactgaatatttagaaaattattgtggtattttttcagagtgttaacttcttttgaagtgttgtgtgaaagacatccattagtatctctgaaattatgaattaaaaagaaggcaataggctgggcgcagtggctcatgcctgtaatctcagtactttgggaggtaggaggatcacttgagcccaggagtgcaaaagcagcctgagcaacatagtgagaccccatccctataaaaaatttaaaaattagccaggcattggtggggcatgcctgtagtcccagctattctggaggctgagatgggaggatcacttgaacccaggaggttgaggctgcagtgagtcatgattgcgccactgcactccagcctgggcagcagaggaagatcttgtctcgaaaaaaaggcagtaggcgaatataattcaatataaaataaaactttgtggagtcatctaatgccagggacataggtggaccgcacctaatgatgatgaaaataagactattaatgaagcagttcacatcagccttttgatactatgcttttatcaagtttgtgtaaatgagattatgcaaataatagtgatggctctcactttgggaggccgagatgggcggatcacgaggtcaggagatcgagaccatcctggctaacacggtgaaaccctgtctctactaaaaatacataaacttagccgggtgtgctggcacgtgcctgtagttccagctacttgggaggcagaggcaggagaatcgcttgaacccaggaggtggaggttgcagtgagccgagatcgcgccactgcactccagcctgggcgacagagcaagactccatctc

SEQ ID NO: 18986 - DNA, 1602 bp, Homo sapiens
cggccgtcagcttccaccaggtggacttcaccttcgaccggcgcgtgctggccgccgggctgctcgagtgccgcgacctgctgcaccaggccgtgggtccccacctgaccgccaagtcccacggccgcatcaaccacgtgttcggccacctagccgactgcgacttcctggctgcgctctacggccccgccgagccctaccgctcccacctgcgcaggatctgcgagggcctgggccggatgctggacgagggcagcctctgaaccccggcgccgcccaaccgcgcccctcgcgccttttggggctctcctgctgggcgcgggtggggtttgtgggtttttttccacctcttttctcccaatcggactccggccaaactcccctagacagatgggtgacctgtctcctttgagaggatgctgaggcatctgtagcagctgtttcaaacaccaatgtcacctctcctcctggcccccgcccaatggggagaggaatttggggccctactctggggaccacctttcacccgtttgtactttctgggccacgccgacccctgggtcgcttgatgtaaaagccaaaagctgctgcctcccacttggatcatgtcgcctgggattttcatccctcgcacaaggactaggggttcacacggtgaactgggggaagggaagtgttagggggcaagtcgcggcacccccccttccataaactcacgtcctaacccccaggacctcagaagatgatctgatttggaaataggatcattacagatggaattagttcagatgatctcatcttggagtagggtgggccccaattcaaggactggggtccttaaaaaaagggggcctggggcagggcgcggtggctcacgcctgtaatcccagcactttgagaggctgaggcgggcggatcacgaggtcaggagatcgagaccatcctggctaacacggtgaaaccccatctctactgaaaatacaaaaaattagctgggcatggtggcacatgcctgtagtcccagctactcgggaggctgaggcaggataatcacttgaaccaggaggaggaggttgcagtgagccgagattgtgccactgcactccagcctgggtgacagagcaagactctgtctcaaaaaaagaagcgggggagtgggggattgaggccaggtgcagtggctcactactgtagttccagcactttgggaggccgaggcggggagattgcttgagctcaggagttcgagaccagtctgggcaacatggtgagaccctcgtctctacaaaaaaaaaattatcgtggtgggccgggcgtggtggctcacacctgtaatcccagcactttgggaggccgaggcgggcagatcacaaggtcaggagatcgagaccatcctggccaacatggtgaaaccccgtctctgctaaaaatacaaaaattagccgggcatggtgttgcgtgcctgtagtcccagctacttgggaggctgaggcgggagaatcgcttgaacctgggaggcgcaggttgcagggaggcggaggttgcggtgagccgagattgcaccactgcacttcagcctggtgacagagcgagactcgtctc

SEQ ID NO: 18987 - DNA, 2503 bp, Homo sapiens
taaaaacaactcttaaggataaaacaaatttcagattaattatgaaaacaagaatgtggcagggcatggtggcctacacaagcaatcctaacactttaggaggccaaggtagaaggattgcttcagcccaggagttcaagaccagcctgggcaacacagtgagatcttgtctctacaaaaacaattttaaaaattagcctacatggcacaaacatcattttgtttgtacactacctatctgagagaaatgacttgaaaatgtgatattatcagctggatcagtcatctgatatgagctataaacgtgcagcacaaatgtcactcagagactgaaaaatgagtaaaaatcaataatttcttagggaaaaaagactgcctagaatcttattaaaaaacattctgggggtctatcagttagaaatattttggttacactgacagataaccaaattcaaatgggcttagagcaaaaaatgggagggcatagaggacacttacttgttcacataactggaaagctccaaggtcagttggtttcaggtaaggcttgatccagcagttcagcagtattactaaggacttgcctttacccatattcttccccatgcctgaatgtccaggtaagagtcattggtcattgtaaagatttgtccagcttccattcttcattcctaatctgagtttgttttccttttagagaataactccctagtgtgtttaatcttagtaagaaggtaattattccaggcaccagtttcatctctactgaaagggaaagaaacagatttcacctctccctttgcccttcccttcccttccccatccctaagtttatgagcagacatatgacttaagcttggtcaggtagatgctgtcttctggactttggatcttgacagagttccacgggatggaaggaacaggggcagccctgcagcatagcctttgctcctccccactgtcaaacctgctgtccatatctaatcaatcctggaagtcctacaagcatttccctttgcttaggttgcctatgtcctgctgtttgattgatagagcaacagagcctttgcaggaaagcccgtgcaaaggagaacctcccaccttgtgtccccagggcactaagtatcatatcttttgatgtgcccatatcgataaacattgtactactgacttagcaatctgtgttccccaccctactgagctctctaaaaacagagtacttagcttatgcttagcccagtgtctggtcaatattagatatttagaaaaatctgtgtgaatgaatgaatgaatgaatcactttagggagaaaggacatgcttgtattaaacagttcttaaatttaagtcatacattatcaagcacaaataataagggctctttacaaagtatcgaactgccataaggaacatttttaggctattttatgaggacttattctttgaggatctatatacctgtcaggatgaatcttggttcatccctgaaatttaatctgaaggcttcttcagtgcagattgctccctatctaataggggataaatatccattatgccaccaggaaatgcctctgacatttaaatgcatgccttatcctaactgaaataaaggatctcaattctccccagtttgcctgcagcaccactcccaggagccaagccctggcctggccaatgacaccacatgtgtagaaagatacactgggttttgcaggtgcgtcgggacgctctgaggaggggagggtaagacggtgacacgcactcctgccactcttacatcgaagcctgacccctgcactgtgtgatcacatacaggctcagcctcctgcaggggcacccgcattccagcctggcacggttggcacccagcacctcccaggggagcagggcagtgcaccgagggtcgagatgctccagcaagggtgggcataaaccagggctggtcttcctctacccttctccttcccttcccctccgagtaatgtgtgtctagccattaggtgagacagaggatatgggtgtgtgcccagagcaggacactgccctgagtccagtggggaggtcgggagggagccccctcagggccaagggtggcagaggagcagggaggtcgctgtcatatgggggactgaccaaagaagtcaatctattaagcatcacagaagccaggtttcttgtcagaaaacggagttgaaaatatgaggagggagaaaactagaattatcccttcaggtggagttggaatctgacccacccatctgaactggtggttttctaggtggctggtgtgttcatttcctacagctgctgtaacaaattgccacaaactgcggggctgaagacaaattgattctcccacagttccagagcccagatgtcagaactcaaggtgttggcagggccgtaatccccaaaagctctaggggagatttccttccctgcccctttcagcttctagtggctccacaacactgagtcctcacatggtgacctcgagagaaagg

SEQ ID NO: 18988 - DNA, 2749 bp, Homo sapiens
gatgttagcctgtaaaatgaactacaggaatagctacagattggaaacaacctgtggtggttttaaaatatagctacaaattctttagcactcctctgtagagaggtgggatccttgtaccctctctgaatcttgggtgagctgatgactgcttcaaccaatggagtacggtggaagtaacactctgacttctaaggtccagacataaaagtacaggcaacttctgctagaactctagctcttggagcctgaggcaccatgcctacctagggctccatgtctgcttagaggctgccatgctgtcaggatgccaagaccatcaggagaggacacatgaaggcaccacagtcccagctaagcttagctttgagtcatcccagttcaagcataaaagaagtgagtgaagaagaaccagatgaggccaggcacggtggctcacacctgtaatcccagcactttgggaggccaaggcgggtggataccctgagttcaggagttcgagaccagcctggccacatggcagaaccccgtctctactaaaaatacaaaaatagccgggcatggtggcgtgcacctgtggtcccagctgctggggaggatgaggcaggagaattgcttgaacccgggaggcagaggttgcagtgagccgacatcatgccattgcactgtagaaggcgaaggggaaggggaagaacaagatgattccagtggccagccatttgaatcagcttcagccttcaaatcttcaaatcttcctagctgaagactcaaacattgcagagtagaaacaagctggcctcactgtgtcctgcctgaattcctgacacacagaacccacaagcatattcaagtggttattgtgttataccactaggtttggggggttttgttctgtgctaacagataactgggacaccacttaaatatccatcaatggaagacgagttatgtacattatatgtctttgtggaatactatgcatccattagaaagaagaaattagtctataattatttatattaatcacacttcaagtgaagaaggatgcagtgttctgaaaagtcttgatagtatgcctccatttgaaattctcaaaaagatggcacatatagagaacttctgggaaaatagacaagaaagaggtaacagtagatgccttgggggagggtaactgatggcaagggtgggaatgaaattcactttttttttttttttttgagatggagtctcgctctgtcaccaggctggagggcagtggtgcgatctcagctcactgcaacctccgcctcccgggttcaagcgattctcctgcctcagcctccccagtagctgggactgcaggcacatgccaccatgcccagctaatttttttttgtatttttagcactttgggaggctgaggcaggtggatcacaaggtcaggagtttgagaccagcctgaccaacatggtgaaaccctgtctctactaaaaatacaaaaatcagccgggtgtggtggcatgcacctgtagtcccagctactccggaggctgaggcaggagaatcacttgaagctgggaggcggaggttgcagtgagccaagatcgtgccactgcaccgtagcctgggtgataagagtgagactctgtctcaaaaaaaaaaaaaaaaaaaaaaaaaaaaaaaaaaaaaagggcagtggatgtagagctggcaaaaacaatgacattgagatgaagcgtgctcaggtcagagctctaacgaagccctctgctgcagactgaatgtttgtatctccctcatattcatatgttgaagtcctaaggtgatgttatttggaagtgggcctttgggagggattacagcctgataagaggagacttgagagcttgcttcttctctgtgccatttggggctacaataggatggtcgtctgtacaccagaagtcaggcccttggttgccagcagaatggaatttgccagcaccttgatcttagactcttcaccctgcagacctgaggaataaatgtgtgttgtcaagccacctgctccatgctaaattgttatagtagcccaagcagattaagatgcctctgtttggctgtctatggctgcataacagaccactccaaatccaatgatttttatcatctttcacaatttctgtgggtcaggaatttgggaagggctcatctgggtggttctgccttggtgtctcttttgtggttacagtggaagccggagcactggggagctggagcagctgggagctggccaagcatctctcttcatatagcctcaaggcctctccatgttgtctctctgcatgagccagttgggcttcctcacagcatggcagctgagagtgttgacacctcttacactgtagctcaggactcccatgagtcaggccacattgcctttatgacccagcctcacaagtcaccatagaatcatttctactgtagtctgagtcactaagtttggctcagattcaaggggaagaaacagactctgttactcagtgggaggagtcttaaagaatttatagacatggttgggcacgatggctgaagtctgtaatcctagcactttgggaggccaagatgggaggatcgcttgagcccaggagctcgagaccagcttggtcaacacagggagcccctatctctccaaaaaacttaaaagttaaaaaaaattagctgagcatggtggcacgcacctgatcgcaccactgtatccagctcgggcaacaaagtgagactctgtctc

SEQ ID NO: 18989 - DNA, 1928 bp, Homo sapiens
aagtaaaatggactaaaattttgcctagatttacctaaaggcaaaatataaaaattaatttctaaatacataagatgcacactgaaagaagagtaagtcagtccagatttagactataaattcaaatgtgaaaattcaagcatctgaaatgagagagggagcacagccttttgaagaaaaataaagcactaaatttaaaaagtattatttttatttcaggaaagaagaagcctgagcttccaaaataactttttcagactgtttattaacccagtcaaaccaagaaaacaaatgtacaattagcttattaaaaatagggactccaatatgggcaacaaagcaagaccctgtctctacaaaaaattaaataagtagctgggcatggtcgtgggcgccaataattctagctactcaggaagctgaggtgggaggaccgcttgagcctgggagattgaggctgcagtgagctatgattgagtgcacttcagcctgggcaacagagtgagaccccgagtcaaaaaaaaaaagggggggggaggggactactattaattaaaatctggaaggagaaaggatacaaaaaaattaacttttgctgaacacttacatgccaagtgttttcgaatatgatatgtgacttaatcctgaacaaactagagtaatacaaactattattgctttttaagaattcagtatttatttatttattaaacagataaggaaatagggttttaaaactgcagaagtgttagaacaagatagaaactttcatttttcctttgttaaaagatttttttttttttttgagacggggtctcactctgtcatccaggctgaagtgcagcggtgcgatctcagctcactgtaaccttcacctcctgggttcaagcaattctcatgcctcagcctccccagttgctggggctacagacatgcaccaccatgcccagctaatttttgtatttttagtacagacagggtttcgtcatggtggccaggctcgtcttggactcctgacctcaggtgatccacctgcctcggcctctcagagtgctaggattacaggcgtgagcgacctcacccagccctaaacaactttttagaagtagaatcaacatacaataatttaaaggcacatttgataaattttcgtgtgtgtgtgtgtgtgtgtgtgtgtgtttatacccccttgaaataatcacataatcaacatactgaatgtattcatcacctcagaaatttccttatgcccattatttttggaatgtttatcaagagtgaatggataaacaaacttgtatatccatgcaagggaatacgactaaacctaaaaatgtgcatgaactattgatacatacaatacgtgtgaatctcaagataattatgctgaaagaatgcacacaaaaaatgttattccatttgcataaaattctagaatgcgcaaattaatctattactgttttttaagatgagaaaaacaaggctcagaaaggaaacatagcttgtattagcaatgctgttaataaatggtgatgcaggatattaatccagttctgctacatcctaaaacccaggtctatacaagacctcaataccaactgcattcgccatagcaagattagaacaaatattcatttggagtcaggggcggtggctcaagcctgtaatcccagcagtttgggaggcctaggcgagcagatcacttgaggtcaggagttcaagaccagcctgaccaaaatggtgaaatcccatttctattaaaaatacaaaaattagtcaggcttagtggcgggcacctgtaatcccagctactcaggaggctgaggcacaagaatcacttgaactcagcaggcagaagttgcagtgagacaagatcatgatcgcaccactgcactccagccctgggtgacagagcaagaccttgtctc

SEQ ID NO: 18990 - DNA, 2592 bp, Homo sapiens
  CDS (508)..(810)
acactgggctccggcggccagagtgggggactaggtgaagcggcgccgggccggggctggccgggaccaggcccgaggctgagcggcggcgacagcggtggccgggaggggggaggagaggcgcagccagaggagccgccgcagtagctcccccgcctcccgggctgagggcggaaagaaaacatgcatatatgattttcttctgatgaaacctaatgtattcaagaaaaagaatcttgctttttggaaggatggaaaaattgggaataattttttcccctttgataattagaccactcagtactgttgcttagtttttggttcagttactttgatgtggttacaagaggaattttggctgtaatggatttcatacatttttaatgtctaatttaatagggatatagacagttggtttaaaccaacatttttggacgaggagaggctatggaaatgaagaaagaagtgtttagaaatatcacacaaacagcattttaagaaagaaagatggatcaacctagtggaagaagtttcatgcaagtattatgtgaaaaatatagtcctgaaaattttccttatcgccgtggcccggggatgggagtccatgtcccagccacacctcagggctctcctatgaaagatcgcctcaacctcccaagtgtactagtgttgaacagctgtggaataacctgtgcaggagatgaaaaagaaattgctgctttctgcgctcatgtgtcggaactagatctttctgacaacaaactcgaagactggcatgaggtttgcagtcctgggaagacattgataaactaaattcatttcccaaactggaaaaagtgagattgttaggaattcctcttctgcagccatataccaccgaggagcgaaggaaattggtaatagccagattgccatcagtttccaaacttaatggcagcgttgttactgatggtgaacgagaagattctgagagattttttattcgttactatgtggatgatccacaggaagaagtgccattcgggtatcatgaactgatcactaaatatgggaagttggagcctttggcagaagtggacctaagaccccagagcagtgcaaaagtagaagtccactttaacgatcaggtggaagaaatgagcattcgtctggaccaaacagtggcagaactaaagaaacagttaaaaactctagtacaattacccacaagcaacatgcttctctactattttgaccatgaagcaccctttggcccagaggaaatgaagtacagctctcgggcattgcattcctttggcattagggatggagataaaatttacgtggaatccaaaacaaaataacctctaccagccttgtgaaaaacatacacataaggacttgttgcagggcatttgtttttaatgtggttttctttaggagggagaggttgtttttgttttgttttgttctgtttaggtttgggaaggattttgtatatttttccccctggagtgagtaggggccatttttgggtgttttctaccacagattgatttggctcagccagcggaattggccacatttccagtgtatgtgccctctctaaggaaagatgacaaagaaatcaccgacttcttactgtgttcactgggatttgcctgccacttggttatcattactgttgggtgaacctgtgaagataacatgaacactgtagccccttagaagggtctcatagagaatttaaacagggtgacaaggaatcttcacaggaagggccagaacttctctctcccagttcttccttccgctaccctccctccttggcttttttggttcagttccatttttttttcattttgacatgtggtttacctaatagttttgttctgttcataattcttatttctcaacctgggtgatttttttgttctcatttctcccttttgaaataattgaaagtgttttaagcatttttaacctgattctaatctcaggtacgcagtaagaagctataaatctgttagaacctcgaagagtagatgtagaatgaaaactccaggaaaacttgcagttattctggaagcaccggcagaacagtctgatctctttgtatgttactaactcacttttaatgtccctgtacattatgtcagccattactttcataacatgaaatatgtcagattccagagttcttttatttttgcttattgaatgtatttcctcatatctttctttttcattactttaaactattgggaattgaggcctgacttcataaataattcaatagagtcctggatacgtgcaccaggagagttgagaattagctcataaactatctgtggtgtgtgtggggaatgaagttgggggatgtgggggaagagcttatgactttcccacctgtgtcatccattggaagcccttgctcttgcactttgcattaaaagtgggaaacattaatcaaagggagattttattcccaggttttccctgggactttgtgatatcataattgaacagttcttttgttttacatttcaatttagttgcctcatagaagtataactgcccaatctatgagtaaagtgtaagtgtcaaaacttt

SEQ ID NO: 18991 - protein, 101 aa, Homo sapiens
MDQPSGRSFMQVLCEKYSPENFPYRRGPGMGVHVPATPQGSPMKDRLNLPSVLVLNSCGITCAGDEKEIAAFCAHVSELDLSDNKLEDWHEVCSPGKTLIN

SEQ ID NO: 18992 - DNA, 2750 bp, Homo sapiens
aatttagggttggggtacaatttgtttctattaagcaagtaccagtttaccaatacatgagtaactgaagtgtaactgttaaatgcttgtatactagtttttctttctgattgtcagtgatttataagctataaatgaccaaggtcctcagactgcttttagcatctgcaacttaaaaaaatgggagttagaaaaagaacaaatgctaaatagagtaacagttaaatgtatgtgtacactcttcccaaatgccaagagtgcagcggtggggtgagattcagatattcatttatttctaagtctgtagttaacatttatgttccctactccctacgtaagccagactttggcaacagtgatagttgattccaggcttatttgacttaaagtcactgaagtggaaactaagaagtggcagttagtgttttacccagcatttctgccttctctcttttcttcatgtgtttttgtctctagcctatgtgtatttgtgtagaataatgtgggatacctgaataatagatttaaaaggaccaagtggtaaaattgggcccaagctgaagtacaggcaaacttgatgtttgaaagataagttttgagaaatgtcattgtattttggagtaaaagaggctatcttagtaataaggaataaacttccataacactaggttagaccacccaataaatctagaaatcagcttttaaaaatattgtctgaagtctaacaaaagttttcacctctaatgtgttctttaagaaatttaaggaacttagccttggattcctgaatagaaaggtaagaattctatcattctggagttgatgaaaacataaattttcaggatgtgaaatgaacagtgatttataaaatggaaatcaaattgtacattagcagagttcttaagctttttgaattgaaggagacctaataattgtgtctttttggttatttagtgacaaacgtggctttcaaactatgcttaaaaagttccggctggacacggtggctcacacctataatcctagcacttggggaggctgaggcagatggattacctgaggtcaggagttcgagaccaacctggccgacatggtgaaacgctgtctctactaaaaatataaaaaattagccgggtgcagtggcgtgcacctgtaatcccagctactctggaggctgaggcaggagaatcacctgaacctgggaggtggaggtttcagtgagctgagatcctgccactgcactccagcctgggcgcaagaccaagacttaaacgcaaaaaaaaaaaaaaaaaaaaaaaaaaaagtttcataatacagcatggtctggtagtttgcaaaatggtgtgcttttggggagatacactagcaatttttttaaaaaatggaacagtgtgataggaagcctgctggatgatttcttaaatattctaaaatgtaagtcaaatatgttttaataacaaagacttaaatggcttttctccctagagactgaaactagtattcattgtgttcagaacttaattgggcttgaactgagatttaaatctaataaacaagttaataaatgtgtatgttttgttgtgggtttggtagtgatctgtggttctatagggtttaataggaattgcttttgatttgtttctggctttagaatgtgaggcaaattttacattcttggttctattaagattttcttaggcatgctaacatgccaacaaaaagccatgtaagtattgtataaaaagattcacattgttaatttagccattttgaaattcagatgagtgagcaagttgataatggcctcatctctgacctgagaaaaaacaactttgacccttgttcttaaaatgctttaaccttgaagttgcttgagacttaagaggtcatgttgctttaggtttaataaatagccttaactatttggaggggaaaagatgggtcaactttttttttttttttggcgtttgcatgtacaactttctatttttagcctatatttggaaagaaagcacttaacattttaggaattctttttaaagctgcttgcaaagtgttggtgattttactgaaaacttttgagatcttcattttacaggcagacctgtctaactacaagccagacttgggttttctcctgtagtttgaagacacactgactcctgacaaaatgcagcctgcaacttcctggagaacaactcagtgtcacattaaagtttattatgtatttaatgatacactgtttaattgacagttttgcatagtttgtctaactttagagaattaagagcctctcaactgagcagtaaaggtaaggagagctcaatctgcacagagccagtttttagtgtttgatggaaataagatcatcatgcccacttgagacttcagattattctttagcttagtggttgtatgagttacatcttattaaagtcgaaattaatgtagttttctgccttgataacatttcatatgtggtattagttttaaagggtcattaggaaaatgcacatattccatgaattttaagacccatagaaaagttgaagaatgcttaattttcttatccagtaatgtaaacacagagacagaacattgagatgtgcctagttccgtatttacagtttggtctggctgtttgagttctagcgcatttaatgttaataaataaaatactgaattttaaagctgttaagaaattgtccagaacgagaatattgaaataaaaacttcaaggttataatcgc

SEQ ID NO: 18993 - DNA, 3693 bp, Homo sapiens
  CDS (157)..(2199)
aatattccaaaatttgaattagttcggcaaaatatcctaagcctccctctgggcagccagattatcgcagtccctgtgaactcatccctgtcttggcacataaacaagctgagagaaactggaaaggaagcctacaatgttagctatgcctggaagatggtacaagacacttcctttattctgtgtattgtggtgatacaaccagaaatacctgtgaaacaactgaagaacctcaacactgttcccagcagcaagctgctgtaccaccggctggatctccttggccagcccagtgcttgcctccacttcaaacagctggcaaccctagaaagtcccaccatcatgctgtctgctggcagcttttcctccccctatgagcacctcagccagccagagacaaagcgcatggtagagcactacaccgcctatctcagcgacaacacccgcctcattgctaacccgggcctcaaattctctgtcagaaatgaagtaatggctaccagccacgtcacagatgaatggatgacacaaatggaaatgagtagcctgaacacttacattgtccgccgttacatagcaacacccaatggcgtcctcagaatttatcctggttccctcatggacaaagcatttgaccccactaggagacaatggtatctccatgcagtagctaatccagggttgatttctttgactggtccttacttagatgttggaggagctggttatgttgtgacaatcagtcacacaattcattcatccagtacacagctgtcttctgggcacactgtggctgtgatgggcattgacttcacactcagatacttctacaaagttctgatggacctattacctgtctgtaaccaagatggtggcaacaaaataaggtgcttcataatggaggacaggggttatctggtggcgcacccgactctcatcgaccccaaaggacatgcacctgtggagcagcagcacatcacccacaaggagcccctggtagcaaatgatatcctcaaccaccccaactttgtaaagaaaaacctgtgcaacagcttcagtgacagaacggtccagaggttttataaattcaacaccagccttgcgggggatttgacgaaccttgtgcatggcagccactgttccaaatacagattagcaaggatcccaggaaccaacgcgtttgttggcattgtcaacgaaacctgcgactctcttgccttctgtgcctgcagcatggtggaccgactctgtctcaactgtcaccgaatggaacaaaatgaatgtgaatgtccttgtgagtgccctctagaggtcaatgagtgcactggcaacctcaccaatgcagagaaccgaaaccccagctgcgaggtccaccaggagccggtgacatacacagctattgaccctggcctgcaagatgctcttcaccagtgtgtcaacagcaggtgcagtcagaggctggaaagtggggactgttttggggtgctggattgtgaatggtgcatggtggacagtgatggaaagactcacctggacaaaccctactgtgccccccagaaagaatgcttcggggggattgtgggagccaaaagtccctacgttgatgacatgggagcaataggtgatgaggtgatcacattaaacatgattaaaagcgcccctgtgggtcctgtggctggagggatcatgggatgcatcatggtcttggtcctggcggtgtatgcctaccgccaccagattcatcgccggagccatcagcatatgtctcctcttgctgcccaagaaatgtcagtgcgtatgtccaacctggagaatgacagagatgaaagggacgacgacagccacgaagacagaggcatcatcagcaacactcggtttatagctgcggtcatcgaacgacatgcacacagtccagaaagaaggcgccgctactggggtcgatcaggaacagaaagtgatcatggttacagcaccatgagcccacaggaggacagtgaaaatcctccatgcaacaatgaccccttgtcagccggggtcgatgtgggaaaccatgatgaggacttagacctggataccccccctcagactgctgccctactaagtcacaagttccaccactaccggtcacaccaccctacacttcatcatagccaccacttacaggcggccgtcacggtacacactgtcgatgcagaatgctaacaatctcctcacctccacgccaagatgagatctgggagctacagaatgttctggaaagaaaaagaaccggcttaaaacccacagcaagagacctcccttgtgtttgtgctttgtgcagagttgtttgagtcatttcctgcctgtcgacatggttaaaaacgagagaaacaacaacacagtcacatttgtgaagatgtgaggctggttctgaaatggaggggaaataagcctgatgaacagacctgccataacactaatggaaggtaacagaaggcgaacctccaaacacagagacggaacctgcaagtgaagctgagccagaggaatgttccaaagagccagaagcattcagctctccttaactggaagagagaaaaatctgctcacccagagactggaatgtggcacatgcagatacaaatgtgtgcattgaagatttcgctttgtttcttagcggtacctggataccacagttgctgtatggaactcatgttatgctctaaacgatgcatctcagaatttctaagtaaaggattatttttctactatttattgaactttcaaacattctcaaactttggggaaaaggaaaggaaacacaggagaagttttcagcagttgccccgagctgttttgtgtgtaatgaagtggttctttgattaaggagctctatttcttatttaactgatatcccactgccccactccacaaaataggaaaatgaagaaatctttctctctgacttgtttacatcatttcacggaaacacatctttgtttgtaatgcagtattctttctctgtgtttgacagagatggggaggggcagaggaatttaagaggttttaaaagaaatgttatgtttcttatgacttgtttccactcctcgtacaatgctattcttaggtttctacgaaacctaatgttagaaccgcatcctttcagctaagggagggttggatttattttccttgttttagagactgcaaatttttaaatatcccattttgactgagaatattgacatataagggaagaagttttctaaattgtgaaagtctggttcttaattaaagaattttttttttaatatcacggttaaaagctgctgccagttagccaagacattatccaccaaattgctttgtgatttatacagggattaatcaaatctggctactataacatggggcattgtaactttaaagtagtgttttaattacagtgatgtattttagactcacattttgtgattcaaatatgttataaaggcattcttgcaccatggtaaagaatgtgtgtggtaaatctccgtttatatgtagttggaaaaaattcactgaataatgttttaatgatagggtattatgatacaatgtaaaaaacaattggttcttcagcagtacagaaagtaaactatatatgtgctatcaggaaaccccttcatactgtgtataaaattgcaatctagtgaaataaaccgtatgcaatgg

SEQ ID NO: 18994 - protein, 681 aa, Homo sapiens
MVQDTSFILCIVVIQPEIPVKQLKNLNTVPSSKLLYHRLDLLGQPSACLHFKQLATLESPTIMLSAGSFSSPYEHLSQPETKRMVEHYTAYLSDNTRLIANPGLKFSVRNEVMATSHVTDEWMTQMEMSSLNTYIVRRYIATPNGVLRIYPGSLMDKAFDPTRRQWYLHAVANPGLISLTGPYLDVGGAGYVVTISHTIHSSSTQLSSGHTVAVMGIDFTLRYFYKVLMDLLPVCNQDGGNKIRCFIMEDRGYLVAHPTLIDPKGHAPVEQQHITHKEPLVANDILNHPNFVKKNLCNSFSDRTVQRFYKFNTSLAGDLTNLVHGSHCSKYRLARIPGTNAFVGIVNETCDSLAFCACSMVDRLCLNCHRMEQNECECPCECPLEVNECTGNLTNAENRNPSCEVHQEPVTYTAIDPGLQDALHQCVNSRCSQRLESGDCFGVLDCEWCMVDSDGKTHLDKPYCAPQKECFGGIVGAKSPYVDDMGAIGDEVITLNMIKSAPVGPVAGGIMGCIMVLVLAVYAYRHQIHRRSHQHMSPLAAQEMSVRMSNLENDRDERDDDSHEDRGIISNTRFIAAVIERHAHSPERRRRYWGRSGTESDHGYSTMSPQEDSENPPCNNDPLSAGVDVGNHDEDLDLDTPPQTAALLSHKFHHYRSHHPTLHHSHHLQAAVTVHTVDAEC

SEQ ID NO: 18995 - DNA, 2338 bp, Homo sapiens
  CDS (20)..(1720)
gtaagtccccccgcctcgcatgatggctgcggtgccgccgggcctggagccgtggaaccgtgtgagaatccctaaggcggggaaccgcagcgcagtgacagtgcagaaccccggcgcggcccttgacctttgcattgcagctgtaattaaagaatgccatctcgtcatactgtcgctgaagagccaaaccttagatgcagaaacagatgtgttatgtgcagtcctttacagcaatcacaacagaatgggccgccacaaaccccatttggccctcaaacaggttgagcaatgtttaaagcgtttgaaaaacatgaatttggagggctcaattcaagacctgtttgagttgttttcttccaatgaaaatcagcccttaactaccaaagtatgtgttgtccccagtcagccagtggtggagttggtgttgatgaaggttttgggagcctgcaagttgttgctccgcttgttggactgctgctgcaaaacttttcttttgactgtgaaacatctaggtttgcaagagttcattattttaaaccttgtgatggttgggctggtgagcaggttatgggttctctataaaggtgtcttaaaaaggttgattttgttatatgagcctttgtttggattgcttcaagaggtcgctaggattcaaccaatgccttacttcaaagattttacctttccttctgatatcactgaatttttaggacagccatattttgaagcctttaagaaaaaaatgcctatagcttttgcagctaaaggaataaataaattgctaaataaactgtttttaataaatgagcagtcaccaagagccagtgaagaaaccttgcttggaatttcaaaaaaagctaaacaaatgaagatcaatgtacagaataatgtggatcttggacagccagtaaagaataagagagtcttcaaagaagagtcatcagaatttgatgtgagggctttctgcaaccagctgaaacacaaagctactcaggagaccagttttgattttaaatgttctcaatccagactaaagacaaccaagtattcttctcagaaagtgataggaactcctcatgccaaaagtattgtgcaaagattccgagaggctgagtccttcacacaactttctgaagaaatccagatggcagttgtatggtgcaggagcaaaaaactcaaggctcaggccatttttctgggtaacaaacttcttaaaagcaaccggcttaaacatctggaagctcaaggtactagtttgccaaagaaactagagtgcataaaaacgtctatttgcaaccaccttcttcgtggctcaggtatcaaaacttcaaagcatcatctgagacagagaagatcacagaataaatttttacggagacaaaggaaaccacagagaaagttgcagtcgactcttttaagggaaattcagcagttctctcaagggactcggaagagtgctacagataccagtgctaagtggagactctcacactgtactgtgcatagaactgatctctaccctaacagtaagcagctcttgaatagtggagtttcaatgcctgtcatacaaactaaggagaaaatgattcatgaaaatcttagaggcatccatgaaaatgaaactgattcgtggacggtgatgcaaataaataaaaacagtacatcaggaaccattaaggagacagatgacattgatgatatttttgctttaatgggagtttagatgttcgttcatatgtgagacttttaagtgattaacaaggctagttcagtgttctaagtagaactgctaagatctggaagtaccacctggactcacagaggagctgctttagtgcagcattgcacaggagttcatttcagttcagtctacatttaaagtagcattgtgtcatttcatcaacaagtatttcttttttggcttcaactacatgtcaggtgttaatatgaaaaatctgccacagcctacccttgagaagcagatgtaattccttgagtgaggctagtaagtctctgaaaaactgaataattttatgacttactaggcaatttaataatcgtttgcaaaaaccattgtgtcttgaggtaaatgaggagcgggggtgggagatagcaaggaaacacctgaaaggtcaatttggtcttattggctccattatacataggtccgcctctgaatactaaagtttgtagctcctgacatttatgttttcctgtttatatgttggaattgatcaacaaggtttgccactgcttgtattaccagggactggttacaaccattatttctcttcatttgcttggcttatctcatattaaagtgagtttggagttctcc

SEQ ID NO: 18996 - protein, 567 aa, Homo sapiens
MMAAVPPGLEPWNRVRIPKAGNRSAVTVQNPGAALDLCIAAVIKECHLVILSLKSQTLDAETDVLCAVLYSNHNRMGRHKPHLALKQVEQCLKRLKNMNLEGSIQDLFELFSSNENQPLTTKVCVVPSQPVVELVLMKVLGACKLLLRLLDCCCKTFLLTVKHLGLQEFIILNLVMVGLVSRLWVLYKGVLKRLILLYEPLFGLLQEVARIQPMPYFKDFTFPSDITEFLGQPYFEAFKKKMPIAFAAKGINKLLNKLFLINEQSPRASEETLLGISKKAKQMKINVQNNVDLGQPVKNKRVFKEESSEFDVRAFCNQLKHKATQETSFDFKCSQSRLKTTKYSSQKVIGTPHAKSIVQRFREAESFTQLSEEIQMAVVWCRSKKLKAQAIFLGNKLLKSNRLKHLEAQGTSLPKKLECIKTSICNHLLRGSGIKTSKHHLRQRRSQNKFLRRQRKPQRKLQSTLLREIQQFSQGTRKSATDTSAKWRLSHCTVHRTDLYPNSKQLLNSGVSMPVIQTKEKMIHENLRGIHENETDSWTVMQINKNSTSGTIKETDDIDDIFALMGV

SEQ ID NO: 18997 - DNA, 1778 bp, Homo sapiens
ttaaccataataatcggaaggctttatagaaccctaaaatatccaactatcattcaatttaaaatttatcacacaaaaaatgagttttatagaatgcttcaaaaaaagccattaaaataaccaaaactaaaaccaagagtttgtaggaaaataccaatatgcaaacattccaaaaggagagcctttattttgccagccaaggtggtattatttgctttaaaaaaaaaatcaatgtaacattggttgtcttttgagaaagttccttgctgggattcttttgctggaaaattctcatgctgagggtaaacaactttggtttgctttttagtgcctgagatctgaaggcagaaggaagattcaaatagaaagaataatggcccattcaacagctgactcctacagacattctgactaagatgcctgttgcaattcccctgagcaacttaataactgtgttttcaaggttaaactcaagaaccaatcagttatctgtaaatgaatatccaacttttctgaaaggaaaaaggtaacatgttaatataaacagcaaatacatacatcatttataaaactgcctcagatcaattaacaagataaacatacttaaaaaaaattcttgccttttgttttaatgggccatagcaaatactatctctgtataatgatcagtaaagagctgtcaaatagataaaaagactcacaatattgaatgttaaaacaaaccctaaatgaagaaaacgttaaataatgctattaggtagtattccttatttccatttttattaaatctgagaactcaacagggttaatcatcaaatgaaaaacatgatttttaaaaagggaataatgaagcaaacattttaatctgtcttaattttaagaacccataatttacatatacagtgtgtttaagcaattttcgtatttgtactacagcaaaaaatgattttacttaccagaagtattgtcatactccaaatggtatccgtgattaaagatttaaaaaaataaaaaataaagtccagcttttttctcatggtcattacacaaaacagttttttatacagttgttttaaattatgaaagggaaaccagagaacagcaagtggaacttaaattttaatactcaaacatatttttatacctcaccacttttcttgaagtggatggtttcaatccactttcatggtttgctgacgtgcattttccctcagtgcaacattactaaaaagcttgtgtgtggaccacactatggcaatgacgtgagattttataaaccatcaccatcgtgttagccttattcacattaatgttttttattaggttctaaaatagcccatttatttttttttcctaaaatattagggttttttccattcattattatatcctatagctctagaagtgtgactccaggattatgctattgaggacataaggcactctctttactttcttgtcagttttgaaaacttctgggaacagattttaatgaatctatttaatgtaatagaatgtttacattccatccaatttacctttatacctagaccttaaggttttattcagctgagtatggaaatgtgtaatatctatttatgtaaataagtagtaaactatggctgagcaattgtgtatttgagtaaattttatagtattcaaacccatggaatagtctttgataaaaataactatccattaaaatgttaccgactatatagtaggatagctctaaattactaaaattgtatataatttattaaatttgacaaacactg

SEQ ID NO: 18998 - DNA, 1847 bp, Homo sapiens
ggcctttttttttttttttttttttttacggagattaggtcttgttatgttgcccaggctggtctcaaactcctgggcgcaataaatccttccacatcagccttccaaagtgttgggattacatgctgcacccccagtgtatcagcacttcttaaattaaaataatcttgccaactaatgtcttgttttacatccttcccctttagtctactacttgccattctatccttagtagcctcgatgacggctccccttttaccccatacctctctcccccaaaaaagcttggacagcaaccaaattggcttgtatcagtattgtcaactggaggcctacatgaggactcagcttactgtttttcttctggttaattgtggacataatcaagttcattgcttttactccccatctgctaccactcttgtgcagctatttatggtgatggctttgttacgtatatacacatagaccattgttaatcccctccttttcctttggctgccaaacagtattcatttgaacatcatcagaaggtgtgcaagcactttgggaggccgaggcgggtggatcacgaggtccagagattgagaccatcctggccaacatggtgaaaccccgtctacactgaaaatacaaaaattagctgggcatggtggctcgtgcctgtggtcccggctacttgggaggctgaggcaggagaatagcttgaaccagggagtcagaggttgcagtgagccgagatcgcgccattgcactccagcttggcaacagagcgagactccatctttaaaaaaaaaaaaaaaaaaaaaaccagcttgcaagctaagtagttatcacatgccaatttacatgatttttcttaaagtcatgagcatattgctgacagaagttacagaaagtacttgccttttgaggttaatctgagtcttccttaatttacaggaggaggatatgtaaaacattctaagcttaggtaaccaaataaacagctttttaaatctagatgaatatccagcaggatgacacgtttttgttgttctatactgtcttccacattgtcatcttacaacctgttttccatccactgaatgctgtttgctccctagatcactgtgtaaacccagttgaccccaccttcatttgtatagccactgaagagcatttgcaaaaatgcgtgtaaatgtagtagagaatatgtttgttagatttattattactgtcatattgcatgagacttaagagtttgattcagttcagagggaggttccatcttcgtgcaagtacaaagatcatttaaaaggctaaatgctgcctcttcaaaaaggtcacaagaaaggctctatgtgcttgatgagtgtaaatgcagtgtttttaaatttaccctgagagactatttttgtacttgtgatgagagaaaatttggaggaagatgtgacattagaattggtcctttaaacatagacttcagatagacctaagggaagaacattctagttgagaacaaagccattgaaatgttaatacgcaagttgggggaatctttgagttagactggttgggctagtaaagtatgatggagtgccaggatttcaggaatgtgttgagagataagaatggaaaagtagtacaactggtttactgaggaatcttaaatctgggtataaacgtgaaatggttttattttttccttactgggtctccagtcatacagtgtaaaacactcctaacctctgtactttcctctgcagtgcagtcctttaagaatcccttggtccgatgtaactttgccgccacttttggttactacaaaaaacttattccagaaattaagacaggttctagccatt

SEQ ID NO: 18999 - DNA, 2005 bp, Homo sapiens
aataatttggtatttgctaattcagtatttgccacactttatagaacacaactacctcaaatacaagaattgactataaatcaaaaacttttttttttaatggtttccagtggatagaggaataaaaacagggtggaggggacaggaatggatttttgacaaatttaactttggtatcatataaatgtataattataaataaatgaataagaagtaatctctaaaaatcaaaagcacagtgaagtaaatgaacctaactatatattaaataggtaaatttctagtgggatgtatatgaaggacaaaaagaattgtaaaattttcctaaactgtaatagtaattatattatttgtaataaaagtattattctgaaagtattaatgtatattacaggatgaaacaaataagtaactgttaatgtcattggaaaccaagattttcagcaaaagaaagataaaaatattaaattgtagggttttgcataacttatttaaaactaaatttgaattggaaatatctgtagcagtttatggtatatttgcaaacagaaaatctgttacagaaaatctgttacagaaaatgttttacctaccactgttttctgaaaagacctggaaaccctgtacaacccagaatcaatgagtacccttggcatctagggtatagtctctaggtttcatttcccactgaaagaattggggttccttggaaaaacgactagttacagttcttgggaaagaaatgaatgagaagtttggaatgtcttgtcattttggaaagcaaggaggcagtctaagactactgaggtcatggtaaagaaactcaagagccaacttacggaggtttctactggtcatagattgaacagctttgagcatcggtaataactgcagtggactgtgaatcacatcaaagatgtttaaatccatgagttcataatacctaaaaagaaatttttttttagtttacttgcaacttttggagtatattaggaaatcaaatcattatttttgaaactgataaataatggaaaacagtatcaagcatttattctacttgcaagtatacttcatggcaaccaaatggtgattgaggggaagtttgtgttcttatatgtattcaagctaattaatgagcaaggacaattggaattagaatatcactgttttggaatcccagatgaaatgatggatctaggcagttgtcaccactgacagaaaaccttacaaaaagactaacccttcattgtgtgccttctacaagatactgttaattaaaaagtcaaacctagatctcatcaagtctggatctgactaccagtttatagaaaatgcagggacagagaaacatgttaagacagcaccataaggatacaatcagcaaagtgtaaatgtgagagaaactacaggacaaatgaccttcaacagataaattgcaaacacaaagctggtggggaaaccaatagattaaaatatttaagagacttttcaactaattatggcaaaaggctttatttgaatcctgattcaaacaagttaattttaaaaatctttttggaaacttcaggaaatgtgtacgctggatattgtatgacagtgcggaattattcatttaggcatgaataatggtaccgtggttgtttttgaaacctatctgttaaagatactatgatttatggattaaatgataaaatgcctggaatttgcttcagaataattcatattgagtggatgggggttcaaatgaaacaagactggctctgattttggtaaatttgaagctgactgatggaatacttgtactattctgttttttaatatagctgaaatttttataagttataaaagaaatatgcaatctaggtgtagtggcttgtgcctgaatcctggttacatagaaggatcccctgagcctagtaattcaaggctgcagtgagctgcgatcacatcactgcattcccgcctgggcaacagaagtagactccatctctaaaaagaaggaaag

SEQ ID NO: 19000 - DNA, 2798 bp, Homo sapiens
tttcccagttccctttgctcatgcttacttagaggaagaaagaaaggggggtacctcttccaagtaccttctaaatgaaacactcaagagagtgctactcaggaaactttgcttggatcctaaaatggactggtcttgggtgtgtaaccccggtgaagttatagcctccccaaattgaggtgacagaaggaagacaagaggtgtaagctggagagggaagggaagaaatcagtggctttggccagcctctgtgccacccagtacgacagaggagtgggaactggccctctggggctctgcttggccataggcactgcacattgtgccacctgctcatcacctcctctagtctcacactgagcatcggagtacctgttgtgcagacaggaaaactgaggagctctgagaggctgagcatggagctcaccccatgccatagggtgtgggaagagggcacaggaggcctcatccatgggggaaagggttgaggatggacatgggtggggagagggcatagacatcccttcctaatctctgttcccaccacatttcataggagatgagttaggagatgacagctaactctcttaaggacattttgaccccagtttatgttggggatggaccagaaaggaaaatgtctagagataggaaggtaaatcaactctgccagcccctaccatcaggtctgggccaccccaaacttgggctgcctcccttagacataggttagagtgagagacccagctgtttctcccgaagcctcgtcttcatgccccagacacctgattgccccaatcaggtgtcagacttgcttgctcttcaaggtccccctgagctgccaagtgttttcattgtaaacagacacatcgccatgtttcagggcttcaacggcgttgtattttggactttgaccgtattttttttctcttaacctactgagactcttccttaagaacaggatctatagctttaaaatgtcttcttctatgggaaatttcctgccaagccagggcactaaattctttcatcattagagctttcctgaagtccggccatatactgagtacctgctctgagttctgggcagcttacaatatcttaaacagattttcagaaaaataatgcaactatattttctagtgtcaactgtatgcaaacagtgtggtaaataccttttaattagtcctccacccacctggagtacagggggtgcgtttattattctgatttcactgatgaggaaatgggctcagaaaggttaagtcccttcctgaaatctcacagccaggagaagctaggatgatttaaaacaaagtttggagaggcactgggcatagaccctggctgtacagcctctaacatgcggcactgcatcttggcagtctctatgcctgtctgtgatgtgtgtgtgcacgtgtaactacacacacacacacacacacacacacacacagctatcacacatctcagagcctaagaaataggactaagcccagaactcctagaatcacctataaatgctaggcatagatggaaattattgtgttccaccagaagcacagctccaaactatacctaaaaaatatttctgcacttcccagagacctggacttcaaactttcccagtggagcctgattatagaacttgagggtcctatctcaggatgaaggggagaggccctggcttcacgggaaggtattccagcattgttctgcttcacccttgactgcgttgtctggcagtttctgtgtgctgccaggatattatatggaactggagaagttggagtcaggtctctgaagctagagtttcactaattagatgcctctgtacatgagaactattactgtctgcaggtccatatagctaagctgccaggaaaaacacattatcttccaaaactttcagagcatgtgcagaaccctttcttagcgttttcttctcagcattttctctgcctcccagaggctggcagccagtgacactgcagagttcagcatgttctaaccatgcacgcagggcaggggctgccttggccctcctcaggctttcgttgggagagcaggcagtggtggagcccttctgggtgcagtcctctggggttgctctttggaactcatgtatgagtttgactccacaaggcttggcatggataccaaaacagttgcaacaaattagttctgaacctggaacagagaattcagtgcttctgttactcaggaaggaggtgttcagaatgccccgtgcagagcagccagtcattactcttgtttgttctcacctgggtgcgcaccctcatgatgcagtggctgtagcaccttcatgccaggtgctgagagaatgggaaattcttcctccccattgacctgagtcccagagacttagggacacagacttcaggtgaggctgcggacctcagaagcagtggataatagattggggcattaaaagcttttgaggcagggggctcatgttttgactgcagggagttatgctgagcaaagagatgtgtttttcaaaaccagggttcaaaaccagtgtccacgctggagtaagtggagcatgcttctctgtgttctctgaatgatcttgcactcctcttaagcaaaggagtaccatgaccatagtcagtgggatcccacaaatgttcttaaatgggtaaggctttaagtagccagagagtatccagcctaccattggcttctccacatcctaaaacctgagacagccttggtatatgctttataaatgtttcttttcttgttgtttaagtaattaaagtgtttaaaatgtc

SEQ ID NO: 19001 - DNA, 1826 bp, Homo sapiens
attgatgttacaccatcaagggtctttgaatactcgattcttttttgattttttttgtctttactcctgtaccaatgtatcctttttaaagaataataaaatttgagaaattaaactcattgttattagtacctttctatccacttctttttttttttccaggatagtgaaaaaaaaaaaaaagaggagtgagggctgaacttgttacgatttagaaattaaggcccattttccttcttaagaacccagtttctctatatgaagcagatccagaccgcaggtccctgtcccaccacgcctttcacttccctgtgcctcgtttccccatctgtagaagagagtcagtcatgataataactcctacttcttggtagtgttgcaaggattaagcagcttaatacttgtatgtgctttgaacagtaacgtgctgtagtgtacaaaagatgtaaattgcagaccaggcatgctggcagctgcctgtagtttcagcttctcgggaagccaaagcaaaggatctcttgagcctcagtatctgaggtcagcctgggcaacctggcaaaatacctcatctcataataataacaacaataataataatgttagctgttatgggctgttattggttacttatcctaagtcacagtcttcttatttaatttactctcatatctcaattgtttttttgaagtaatcaattatcttccttgattgggtttgtttccagtatttgtctttggaaaggaatcctgcatttatacctggttatttatagcttcttctaaaggggtgaaagtatttccctacacagtcatgcatcaccatgcccggtcagttctgagaaatgagttgttagatgatttcatcgtgcaaacatcacaaagagcacttacacaaatgtacatggcatagccggctgcacacgtaggctacaggctataagtgtagcctgtgctcctaggctacaaacctgtgcagcatgtgaccaggctgaatactgtaggcaattgtgacacttaatacaatggtttttatgtatcaaaatgtgggaaaggtatagtaataatgcagtagaggccaggtgcggtggctcacacctgtaatcccagcactttgggaggctgaggcgggcagatcacgaggtcaggagatggagaccatcctggctaacacagtgaaatcccgtctctactaaaaatataaaaaattagccaggcatggtggcacgcacctgtagtcccagctactcaggaggctgaggcaggagaattgcttgaacctgggaggcaaaggttgctgtgagctgagatcatgcctctgcactccagcctcggctacagagcgagaccccatctcaaaataataataattattattattaagaagggaaaaaaatggtacacctgtacacctgtataaggcacttaccatgaatggagcttgcaggatggaaagtggctgtggatctgggtgaatcagtgagtggttagtgaatgtgaaagcctaggacatcactatctactactgtagacttataaacactgtatattggccaggcgcggtggctcatgcctgtaatcccagcactttgggaggccgaggtgggcggatcacgaggtcaggagatcgagaccatcctggccaacatagtgaaaccccatctctactaaaaatacaaaagttagccgggcatggtggcgcatgcctgtaatcccagctacttgggaggcggagggaggagaatcccttgaaccagggagttggaggttgcagtgagctgagattgcgccacagcactctagtctggtgacacagcgagactccatctc

SEQ ID NO: 19002 - DNA, 3706 bp, Homo sapiens
  CDS (395)..(982)
caaaatattatccattgtaaactgagatttaattctcaaatgtattctacttgttctaaaacaatctgtccacaaatataagactataagtaataaattgttatttccgcacaatgggaatctctaatgtgaaaatgtattctatgaaaataatttttttaaataaaatgttgtataaaaaaaaaaaaaaaaagatgaactgtccctgcatcggcctaaaggtatcagtgctcaaaatcccactcctgctttccaactcaaaggcttgactcttgcagttcatctctcttctgtatcatcagatttttcctctctatcggattattgccctcctgcttctcctccatttctctgttcccctttatagcaaagtccttggcagagctgcccctgcatgctgtctccactttctcatctcctgctcttgaatcagtcaagccaggctgttgccttcttcctcctctacaaccatgcatgccaaggtctcctggccaaatccaatggctacttcccagccctcatccgacttgacctctcagcagcattcagcccacctggggccctctctttccttgccttccaggacctcatgctctcctgggcttcctcctgcctctccaagcacaattctgtctcctttgctggctcttacacatgtcccccctctaaaatgcagggtgttctaggactcagtcctcagacttcttcccatctctctttatcctcactcctgagtgatctccttgggtctcatggctttaaacaccatctgtattgtaacaactcccaaatttatatccctagccctaacctttccactaagcttcagacttgtacatctccattcagtgtctccactgggatgtttcatacacatctctaccccccctcccccaaccttaaccctaacgctaccacattcgacactgaactctgggttttccctcccagatctatcccaccccaacattccccatctcagtaaatggcaccagcagccgctgagttgtgccagatgagaaccttgaagtcatcttgaccctctcccaccccacgtgcagtctatcagcaaatcctgtcaattctgctattaaaatacagtcaggatccaaccacttcccatcactctcacagctattgtcctagtctgagtctggatgatggcaatcactgccgctctggtctccacctgcttcctctcttgccccttcagtcttttctgaacccagaagccagagtatcttaaaacataagtcagatcatggctctcctctgcccaacactccctagttctccctgtatttctcagagtaaaatccaaagtcctttgggacactgaggcacagtaaaggggcttcatgcttttttttgtaaacatgcatcatctcatgtgattaattcaattactccctcaaaaccctatgtggtagtactgctaccctcatattacagatgaagaaactaaagctctaagaggttaaattgcccagagtcacacagggatttatggcagagctgggatgcaaaccccagcctttgactccaagtccagtgcactttcttctaagccaggctggaactgtgggttctcgcttgggttctgccactatcttgctatgtgatcttgggcagtcccttcccctctccaggcatcagctttctcacctatgagatgggaaggttggctatgtcctcactcagggtcagggttacatcagaggatctgggagagccatttggattggccttaccttcacagctgccttcaaatttagactttcgacaggctctcccaatgagaggacatatgcagttactaacacgcactgactgaaagaagatgctggctgtacaaacttgctggacccactgctggtgaggctctgagaattaattacttttatataaccataattatatcatgaatagcacaatcctacaggattatactgtagtagttaaaggcattggtttgttgtgtttaaacatttgcacagaccacatttttgtaaactcatttggatatctatctatctatcaatcttttcttttcttttttctttattttaaatttgagatgaagtcttgctcttgtcccccaggctgcagtgcaatggcgcgatctcggttcactgcaacctccacctctcgggttcaagcgattctcttgcctcagcctcctgagtagctgggattacaggcgcctgccaccatgcccagctaaattttgtatttttagtagagatgaggttcccccatgttgaccaggctggtcttgaactcctgacctcaggtgatctgccctccttggcctcccaaagtgctgggattacaggtgtgagccactgtacccagcctgtctgtctgtctatctgtctgtctatctatctatctgtctatccacctacctatttatttagagatgaggtcttgctatgttgcccagctcggtccctaactcctgggctcaaacaatccttccaactcacacctcagcctcctgagtaactgagactacaggtgcatgccaccacaactggataatttagaaaaaattactttttagagatgaggatcttgctatgatgcccaggctggtctcaaactcctggcctcaagtgatcttccttcctcagcctcccaagtagctgggattacaggttgtctttatttttcaaaaccctggaaaccccaccaaatggagcttttggcccttttctcccaggtccctcctcccagcaccatgactcacgttgaagatattactgatgaccatcctcaggttgcctaaagctgtcacctccaccagcaccatcaccaccaactgcgccaagttgaccttccccaagacagcttccactgagatcagcaccgacaaagcactcatggtggccagccgaatactgggggagagagggagagccaggacgactgagaaggaaggatgcctctcactcattcattcattcattcattcattcattcattctttcaacaaacactgttgggcacctactttctgtgggaatagaagacaagatttctacccacctgggcgctgatgctgcagagtggagtgaccatctcttctcccgttaaggtggcctctgcaccctgagccatgtggtctggcagatgacttaaccactctgtgcctcagtgccttcatctatgaggcattgatctacacacactcatctgactgagggtgatcggggtgactgttccctcaggggatctgataactgggattctgcccagtcttcttttctgctgccatcattcggatgctcaacagagggcactcttcccccgcaggcctgcccacatccagtcaccccatccccatctggggccactgtcccttctctccgtctccgtggcagtggaaagaaactggatttggaatcaggacaagcccggcttccagtcccagccttgccactggagtggctatttcatctcactgagcctatttctccttctgcaaattaagaatgatgatcaaacgtatcccatgttggtgtcctggggatgtgaaggagttttcttcctatcggtgtgtctagcaccaagactggcacaaagaaccaacttctgaaaagacgctagccttattaacgctattatgattccttccttcctttgaccaatgagcatgctcaggagtagaaaattattttggtcttgaagatacttatgatcc

SEQ ID NO: 19003 - protein, 196 aa, Homo sapiens [sequence omitted]

SEQ ID NO: 19004 - DNA, 6060 bp, Homo sapiens
  CDS (89)..(1342)
caactatacaaaacagtatccggtgtttgtgggccacaagccaggacggaacaccacacagaggcacaggctggacatccaggtgattatgatcatgaacggaaccctctacattgctgctagggaccatatttatactgttgatatagacacatcacacacggaagaaatttattgtagcaaaaaactgacatggaaatctagacaggccgatgtagacacatgcagaatgaagggaaaacataaggatgagtgccacaactttattaaagttcttctaaagaaaaacgatgatgcattgtttgtctgtggaactaatgccttcaacccttcctgcagaaactataagatggatacattggaaccattcggggatgaattcagcggaatggccagatgcccatatgatgccaaacatgccaacgttgcactgtttgcagatggaaaactatactcagccacagtgactgacttccttgccattgacgcagtcatttaccggagtcttggagaaagccctaccctgcggaccgtcaagcacgattcaaaatggttgaaagaaccatactttgttcaagccgtggattacggagattatatctacttcttcttcagggaaatagcagtggagtataacaccatgggaaaggtagttttcccaagagtggctcaggtttgtaagaatgatatgggaggatctcaaagagtcctggagaaacagtggacgtcgttcctgaaggcgcgcttgaactgctcagttcctggagactctcatttttatttcaacattctccaggcagttacagatgtgattcgtatcaacgggcgtgatgttgtcctggcaacgttttctacaccttataacagcatccctgggtctgcagtctgtgcctatgacatgcttgacattgccagtgtttttactgggagattcaaggaacagaagtctcctgattccacctggacaccagttcctgatgaacgagttcctaagcccaggccaggttgctgtgctggctcatcctccttagaaagatatgcaacctccaatgagttccctgatgataccctgaacttcatcaagacgcacccgctcatggatgaggcagtgccctccatcttcaacaggccatggttcctgagaacaatggtcagataccgccttaccaaaattgcagtggacacagctgctgggccatatcagaatcacactgtggtttttctgggatcagagaagggaatcatcttgaagtttttggccagaataggaaatagtggttttctaaatgacagccttttcctggaggagatgagtgtttacaactctgaaaaaatgcagctatgatggagtcgaagacaaaaggatcatgggcatgcagctggacagagcaagcagctctctgtatgttgcgttctctacctgtgtgataaaggttccccttggccggtgtgaacgacatgggaagtgtaaaaaaaacctgtattgcctccagagacccatattgtggatggataaaggaaggtggtgcctgcagccatttatcacccaacagcagactgacttttgagcaggacatagagcgtggcaatacagatggtctgggggactgtcacaattcctttgtggcactgaatgggcattctagttccctcttgcccagcacaaccacatcagattcgacggctcaagaggggtatgagtctaggggaggaatgctggactggaagcatctgcttgactcacctgacagcacagaccctttgggggcagtgtcttcccataatcaccaagacaagaagggagtgattcgggaaagttacctcaaaggccacgaccagctggttcccgtcaccctcttggccattgcagtcatcctggctttcgtcatgggggccgtcttctcgggcatcaccgtctactgcgtctgtgatcatcggcgcaaagacgtggctgtggtgcagcgcaaggagaaggagctcacccactcgcgccggggctccatgagcagcgtcaccaagctcagcggcctctttggggacactcaatccgaagacccaaagccggaggccatcctcacgccactcatgcacaacggcaagctcgccactcccggcaacacggccaagatgctcattaaagcagactagcaccacctggacctgacggccctccccaccccagagtcaaccccaacgctgcagcagaagcggaagcccagccgcggcagccgcgagtgggagaggaaccagaacctcatcaatgcctgcacaaaggacatgccccccatgggctcccctgtgattcccacggacctgcccctgcgggcctcccccagccacatccccagcgtggtggtcctgcccatcacgcagcagggctaccagcatgagtacgtggaccagcccaaaatgagcgaggtggcccagatggcgctggaggaccaggccgccacactggagtataagaccatcaaggaacatctcagcagcaagagtcccaaccatggggtgaaccttgtggagaacctggacagcctgccccccaaagttccacagcgggaggcctccctgggtcccccgggagcctccctgtctcagaccggtctaagcaagcggctggaaatgcaccactcctcttcctacggggttgactataagaggagctaccccacgaactcgctcacgagaagccaccaggccaccactctcaaaagaaacaacactaactcctccaattcctctcacctctccagaaaccagagctttggcaggggagacaacccgccgcccgccccgcagagggtggactccatccaggtgcacagctcccagccatctggccaggccgtgactgtctcgaggcagcccagcctcaacgcctacaactcactgacaaggtcggggctgaagcgtacgccctcgctaaagccggacgtaccccccaaaccatcctttgctcccctttccacatccatgaagcccaatgatgcgtgtacataatcccagggggagggggtcaggtgtcgaaccagcaggcaaggcgaggtgcccgctcagctcagcaaggttctcaactgcctcgagtacccaccagaccaagaaggcctgcggcagagccgaggacgctgggtcctcctctctgggacacaggggtactcacgaaaactgggccgcgtggtttggtgaaggtttgcaacggcggggactcaccttcattctcttccttcactttcccccacaccctacaacaggtcggacccacaaaagacttcagttatcatcacaaacatgagccaaaagcacatacctaccccatcccccacccccacacacacacacacacacacacacatgcacacaacacatacacacacacgcacagaggtgaacagaaactgaaacattttgtccacaacttcacgggacgtggccagactgggattgcgttccaacctgcaaaacacaaatacattttttaaaatcaagaaaatttaaaaagacaaaaaaaaaagaattcattgataattctaactcagactttaacaatggcagaagtttactatgcgcaaatactgtgaaatgcccgccagtgttacagctttctgttgcagcagataaatgccatgttgggcaactatgtcatagatttctgctcctcctctcttttaatgaaataacgtgaccgttaacgcaagtaactctttatttattgttcaccctttttttccttaaggaaaggactcttccaaatatcatcctatgaacagctcttcagaaagcccattgaaagttaaactatttaacgtgaaatccattaactggaataattgagtttctttatttttacaataaattcactgagtaaataagttggagctggaattctgagctttgtgtttggactgtctggtctgtagctaaaggaaaaagttaggaggggaatatttatttaaatctatcagttcattgcctggtcaggtctctggcctataaacatgcaaaaaaactaattcatgttaaagtccttccagatcctaatttctaaagcaatcaggagagaaagcttttagaatggcacatcatatctcattgatgccaacatggttttgtccatggttctgactttctgtgaaggcaccagcttgcaatatgccatcccatttcaccttgcatgtgagacagcaaacaaaatccacaaatggtgtgaactaatatgctggctgctaccttgcataaattaatgatttgatcacacgggttcttcgtggggttacatctgtgaatagcctgttttacacatgtaaatttgtgccttacaccttgagttgtgtacacttgtaaactctttatgatcaactgttcccccttttgaaataagtgcagatatttatttaaccctcccttccccaccctctgccccacttccagccctctgaaagattggagtcaagcagatggaagaatgcagtggtgatagttgtcatgcgacagcctgagaacgctgggcagcaccacaccctccaattcacactgccttctagttgtgccaactggaaccaccctttggctgtgctgcgaagcatggaccccagtgttgttgtgggtgtgtcaaatcccctttcatcctcaagagctccctgcttcccttagattatttcaatacggtgatatccttatttgctagcagaaaagggactaacgtcccattcctcttttctgctgcgtccactggctagagagcaggcggtgcgcggttgggcagacacctgggaggagtctccaagccatgtgcacagcacacacgtgcagtgcacacaaagaaatgacatggaaatagatgcaggcaggctggtccctgctgtgattaacgagtaactccaagtacaaggccgaccacaatggatgctgcaaaaacgttgactggggcaaaggattttttattttattttttattttgttaattatgtttttaggggatgggaggtggtgtgtgtttttctcctcttggttttcatttgctcaagcacacaaaagggacttttgtttactctatcatgaacaaaggaactgtccacatactgtaaaccatgagcagtgttgttgttgtttttttaaacagtatatttggtggtctctttgtctgcttttatttccagttcgatcttctgggtttagttttgtctttaaaaagaattcaaaaaaaagactgacaatgacagttttgagttggatagtgaaaaagtggagcctccataatcagtgtggttgccttcagacctgagtacttagctgagggtgggtgagagccctttgttccaaaagtccattagttttgctgttgtttaggagtaggtggttgttgttgtttttactttttttttttggcttttgtaatggaatccatgttcacatcctgtgaactctgtctcctgaaaccctgaagtatttcctagaacctgaaatattgttttcttccttgaattttctctagaaatgcagaaattaggaaggtgatgggtctgtatccccctgcccccttctttcccatgcttgactcccaagagtactggcagtgcagcacccatcattgacgtaagcggctgtcttgtccagtgtttgtaggcatcactgcctcagctgttaaggagacctgtgtcaaaacttacatccacattcctacacccccacaacccatcacttctggtgttaaccctaaaatacccacatgtattgagctggtcttctgcatttaagtatttctccccagtttttttccccactgtgtgtggggggagggtccataaacccgagtgtgcctttgctttccacccttgctagacactggtagatgcaacaaactcagatttatatttgttgtaaagttgtaaaaatattgtgatgtcaccaattttccttccatctccacatcccctaacatctgattcacgacttaatgtatgttgtaagaaaagaaaaaagaaaagaaaaaaagggaaaaaagaaaagcaaggaaaaggctctttattacttaaaagtaataaaacctgactgttctatatt

SEQ ID NO: 19005 - protein, 418 aa, Homo sapiens [sequence omitted]

SEQ ID NO: 19006 - DNA, 3164 bp, Homo sapiens
caagttcgagcagttttcctgcctcagtcttctctgagtaggtgggaccacagtggcacaccaacacaccttgctaatttttcttttaataagagacggtggtctcagccgggcgcaatggctcatgcctgtgatcccagcactttgggaggccgaggcgggtggatcacgaggtcaggagttcgagaccagcctggccaatatggtgaaaccccgcctctactaaaaaaatacaaaagagtagccgggtgtggtggcggtcacctgtggtcctagctactcgggaggccgaggcagaagaatcgctcgaacccaggaggcggaggttgcagtgagccgaggttgtgccactgcactccagcctgggtggcagagcgagactctgtctcaaaaaaaaaaagggcggcggcggggaaggtggtctcactgtgttgcccaggctggtttcaaactcttgggctcaagtgatcctcctgcctcgacctcccaaagtgctgggattacgggtgtataccaccacgtctgactaattaaaaaaaaattattttcgtgcagatggggtggggtctccttatgttgcccaggatggtcttgaactcctgggctcaagcagtcctcctgccttggcctcccgaagcgttgggattacaggcgtgagccaccacacctggacatcagtattttttttgttttttgcgacagagtctcactcttgtggcccaggctggagtacagtggtgcaacctcagctcactgcaacctctgcctcccgggttcaagtgattctcttgtctcagcctccagagtagctgggattacaggctcgtgccctcacgcctaatttttgtatttttagtagagacggggtttcaccatgttggctgggctggtctcgaactcctggcctcaagtgatccgcctgccttggcttcccgaagtgctgggattacaggcgtgagccaccgcgcctggctgtcagtatttttaaatggttgaatgccatcccactgcctgcctgtctcctgccactgaccctgctggcggttggtggtttgggtggtgatggtgttttgctgtcatagttaccaaagcaggcagcgtctctgttttgcatacagaacttctatcacgtcggaagttattttcttatttactttattttttttttacaaaaaagtaggggaaggcacccagccgtgggttttcagatcaaagggaaagaaacagttactggctttatctgattataacagtaatttggaagataaagaaaagaaaaatccattcaggcctttttttttctgctgtcatttccttttgtttccctgtgggtacagctgcagggacatgtaccaggagctgcagctatctgcttaatgacggatcccagagataaggggacagcgccactaacattctttcagcgcctaagatgcctctgattccagaaggatgacttgcattaaagagttcagcagcaacaagaaaataaaacacacagacacacacacacagacacacacacacacacacacacacacacacgcacaaacacacacatatatatttttcccccccaaaatggggattaaactgtatattctttttccctagaacataccattttttgtttcttttaatgctctctgctttgactttcattttggatatggacgctgtgacttctgttgttgtcttggtagcatttgaccattgttatctttatttattacttttctacctctcctggccttggccatttgttttggtggttgttgttgtttgtttgttttttgacacagagtctcactctgtcgcccaggctggagtgcggtggcacgatgtcggctcactgtaacgtccgtctcctggttcaagcgattctcctgcctcagcctcccgagtggctgggactacaggcgtgtgccaccatgcccagctacttttttatatttttagtagagatggggtttcaccgtgttagccaggatggtctcgatctcctgacctcgtgatccgcccgcctcggcctcccaaagtgctgggattacaggcaggagccactgcacctggccttttttttttttccttaattttattttatttttgagacggagttttgctcttttttgcccaggctggagtgtggtggcgcgatctcggctcactgcgacctccgcctaccgggtgcaagtgatgattctgcctcagccacccgagtagctgagattacaggcacccgccaccatgcccagctaatggccatttgttttagacgtgtcccttttagaaagtgtagattttttagctgggcatggcggtacatgtctgtggtccaagctgcttgggaggctgaggcaggaggattgcttgagcccaggaggttgaggctgtcagtcagctgtcattgtgccatggcactccagcctgggcaacacagccagaccctgtctcaaaaacaacaacaaaacagagagtgaaaaaacggaggcagcctacaggcccttctcatcgcgggggtggttaaagtaagtgcattagggtttctccataccttggctcaataggctgctgttaaaatgaagctcctttcatatgtatcagtcatgttgaggggaaacgttgcaaagcaggactgttggtaaattcccactttttttttttttaaaatactgtgtgtgcatggttgtgtctgcgtagccttcatatttacacggttgtgtgtgcttgtggaaagttctagaaggatacaccatgctgttactagtagctgactctgtggagttggtaggagggtcactggagaggaacttgcaacatatatacacttcagtggtgtcttttttgggcagacggggcaacaagtaatatatactagtaataagataatacacgttaaaaacagcctgtaatcccagcactttggaaggccaaggcgggaggattgcttgagaccaggagtttgagaccagcctgggcaacatagcaagaccctgtctctaaaaaaataaaaacttagctgggtgtggtggtgtgcacctgtagtccagctactcaggaggctgaggtgggaggataacgtgagcccaggaggtcgaggctgcatttagtggtgatggtgccacagtcctctggcctgggcaacagagcgagaccttgtctct

SEQ ID NO: 19007 - DNA, 1982 bp, Homo sapiens
  CDS (48)..(497)
gttgacccgcggcgttcacgggaactgttcgctttagtgccggcgccatggggtcggagctgatcgggcgcctagccccgcgcctgggcctcgccgagcccgacatgctgaggaaagcagaggagtacttgcgcctgtcccgggtgaagtgtgtcggcctctccgcacgcaccacggagaccagcagtgcagtcatgtgcctggaccttgcagcttcctggatgaagtgccccttggacagggcttatttaattaaactttctggtttgaacaaggagacgtatcagagctgtcttaaatcttttgagtgtttactgggcctgaattcaaatattggaataagagacctagctgtacagtttagctgtatagaagcagtgaacatggcttcaaagatactaaaaagctatgagtccagtcttccccagacacagcaagtggatcttgacttatccaggccacttttcacttctgctgcactgctttcagcatgcaagtaggtatttcattaaacattcagaaaagttaccaatttacaagtgggtttttcatccccaaggaatacttctaacttagttgatatcaattcagagcatattttcccctagaaataatattaggaatattggccaagtgactatattcccagtttatcccataatgtagctaacaacttggaactagtgttgccagaattccactagcaaatagcagctgtatatatatgctgggaattctgatttcagtctgccttttgtaagagatgatatctgtcattaaaacagtcttcacatgagatttttctgctcatattttttaaaaagtactggttgggccaggcgtggtggctcccgcctgtaatcccaacactgggaggcagaggcaggaggactgcttgaggcaaggagttcaagactagcctagacagcataataagaccccaatctcttaagaaaaaaaaaaaaaattagctgggtgtcagcacatgcctccagtcctggcttctcagctactcgggaggctgaagctgaaggctcactggagcctaggagttcttggttatagtgagctatggtcacgctactacactgcagcctaggcaacacagcaacactgtctcttttttttttttttttttttttttacattttttttatttttattttattttattttttttttaatttatttttttattgataattcttgggtgtttctcacagagggggatttggcagggtcatgggacaatagtggagggaaggtcagcagataaacaagtgaacaaaggtctctggttttcctaggcagaggaccctgtggccttccgcagtgtttgtgtccctgattacttgagattagggattggtgatgactcttaacgagcatgctgccttcaagcatctgtttaacaaagcacatcttgcaccgcccttaatccatttaaccctgagtggacacagcacatgtttcagagagcacagggttgggggtaaggtcacagatcaacaggatcccaaggcagaagaatttttcttagtgcagaacaaaatgaaaagtctcccatgtctacttctttctacacagacacggcaaccatccgatttctcaatcttttccccacctttcccgcctttctattccacaaagctgccattgtcatcctggcccgttctcaatgagctgttgggcatacctcccagacggggtggtggccgggcagaggggctcctcacttcccagtaggggcggccgggcagaggcgcccctcacctcccggacggggcggctggccgggcgggggggctgaccccccccacctccttcccggacggggcggctggccgggcggggggctgacccccccacctccctcctggacggggcggctggccgggcagaggggctcctcacttcccagtaggggcggccggggcggctggccgggggggggggctgacccccccacaacactgtctctt

SEQ ID NO: 19008 - protein, 150 aa, Homo sapiens
MGSELIGRLAPRLGLAEPDMLRKAEEYLRLSRVKCVGLSARTTETSSAVMCLDLAASWMKCPLDRAYLIKLSGLNKETYQSCLKSFECLLGLNSNIGIRDLAVQFSCIEAVNMASKILKSYESSLPQTQQVDLDLSRPLFTSAALLSACK

SEQ ID NO: 19009 - DNA, 2484 bp, Homo sapiens
  CDS (1696)..(2007)
catctttcaacattttttttttttttgagacagagttttgctcttgccgtccaggctggagtgcaatggcgcgatctcggctcgctgcaacctccacctcctgggttcaagcaattctcctacctcagcctccagagtagctgggattacaggcacctgacatcacgcccagctaatttttgtatttttagtagagatggggtttcaccatgttggcaaggctggtctcaaactcctgacctcaggtgatccaactgcctcggccttccgaagtgctgggattacaggcctgagccaccgtgcctggccttttattttgtgtgtgtgtttgatttctgacttggcctttttaaaaaaatcacaaaatatataatacggccgggtgctgtggctcacgcctgtaatcccagcactttgggaagccgaggtgggcagatcacgagatcaggagatcgagaccatcctggctaacacagtgaaaccctgtctctacttaaaaaaaaaaaaaaaaaaaaagatagctgggcatggtggctcgcatctgtagtcccagctactcaggaggctgaggcaggagaatcgcttgaaccggggaggcagaggttgcagtgagctgagagcacgccattgcactccacactccagcctgagcaacaagagcgaaactccatctgaaaaaatatatatatataaaacaaaatttataattttaaccatttttaactgtaaagtggcattaagtacatccatattattgtgttatcaccataagtggtgatattccactatcaccgtaagtggaataatataatatttattcattcattccttttttttttttgagacagggtcttgctttgtcacccaggctggagtgcagtggtgtgatcacggctcactgcagccttgacgccctgggctcaagggatcctcccatctcagcttcctgaggagctgggattataggtgcatgctaccacgctctgctatttttttattttttgtagagacagggtttcaccgtgtcgtccaggctggccctggactcctgacctcaagtgattctcccacctgagcctcccaaagtgctgggaatacaggtgctgggattacagatgtgagccaccaagcccagccaatattaatcctttcacttagcataatgtcttcaaggttcatccacattgtagcatgtgtcaaatatctttcttttttttttttttgagacaaggtctggctcccctaggctgaggtgtagtggcgcgatttcagctcattgtaacctccatctcctgtgctcaagccatcctcccaccttagcctcccaagcagctgggactacatgtatgtgccaccacacctggctaattttttttttttttttttttggtagagatgttgtttcaccatgttgcccgggctggtctagaactcctgggttcaagtaatcctcccacctcagcctcccaaagtgctgggattacaggtgtaagccaccccgcctggccttcacttattttaaaaggctaaataatacaattattattattcatatcatgtatgtattatatgtaatacaataatacagacaatttcattgtatagatatacctcattttatttgtccattcatccgtagatggacacttgggttgcttccatttcttggctgttgtgaataacactgctacaaacatgggtgtacaaacatttcttctaatccctgctttcagttgttgtggatatatacccagaagtggtattactggatcatatggtaattctgtgtttaatttttttttttttttttttttgagacggagtttcacttttgttgcccaggctggagtgcaacggcgcgctcttggctcactgcaacctccgcctccctggttcaagcgattctcctgccttagccccctgtccatgtttaattttttgagaaactgccatactgatttccatagcaactccaccattttatttatttattttttattgcttttttagagagggagtcttcctctgtggcccaggctgaagagcagtagtgtgatcatagcatcatagctcactgcagcctccaactcctgggttcaagggatcctcccacctcagcctcccaagtagctgggactacaagtgtgtgccatcacgtttggccaattttgcattttttataaagatggggtctctatatgtttcccaggctggtcttgcactcatgcctgtaatcccagcacttcgggaggccgaggcgggtggatcatttgaggtcaggagttcgagattagcctggccaacatggtgaaaccccatctccactgaaaatacaaaatttagccgggcgtggtggcacgtgcctgtaatcccagctactcgggaggctgaggcaggagaatcacttgaacacaggaggtggaggttgcagtgagccgagatctcgccacttcactccagcctgggcaacagagactccgtctg

SEQ ID NO: 19010 - protein, 104 aa, Homo sapiens [sequence omitted]

SEQ ID NO: 19011 - DNA, 1516 bp, Homo sapiens
catgctctctgctgatgtttaccttcacatcttctatctccccaggggtttctcacaggctttatgtcagtttcttggatgcatcaccttctccctctcaatttcgcagtatgtgggttgggagaaggttccagttgtccttgtccgttctccattttctcatagctgaaagtttttaatttatcttttatgtaattatatatattcatatcaccatccatcaagctggtttttaaaactgaaaattatttcatatttttaggaagctactcgattgcatgtatgtaaggccagctcattttaatctcatattaagttaatcaagtaaagacctttataaaaaagaagattttgggctgggcacggtggcttatgcctgtaatcccagtactttgggaggccgaggtgggtggatcacgaggtcaggagatcaagaccatcctggctaacatggtgaaaccctgtctctactaaaaatacaaaaaattagccaggtgtggtggcgggcacctgtagtcccagctacttgggaggctgaggcaggagaatggcgtgaacccaggaggcaaagcttgcagtgagccgagatcgcgccactgcactccagcctggggaacagagtgagactccgtctcaaaaaataaaaataaaaaaacaataataaagaagattttgggtcgggcgcggtggctcacacctataatcctagcagtttgggaggccgaggtggtggatcacaaggtcaggagattgagaccatcctggctaacatggtgaaaccccgtctccactaaaaatacaaaaaattagccaggcgttgtggcgggtgcctatagtcccagctgctcgggtggctgaggcaagagaatgtcatgaacccgggaggcggagcttgcagtgagtcgagatcacgccactgcactccagactgggtgacagagcgagactccgtctcaaaaaaaaaaaaagaagattttgaattgtaaggcaacccacattgttaaacttcattttattttatttttatttgaagtttttatttgtaaaaatatagaaacagggtttcaatatgtcacccgggctgatcttgacctcctgaggcaggagaatggcgtgaacccaggaggcaaagcttgcagtgagccgagatcgcgccactgcactccagcctgggcaacagagtgagactccgtctcaaaaaataaaaataaaaaaacaataataaagaagattttgggtcgggcgcggtggctcacacctataatcctagcagtttgggaggccgaggtggtggatcacaaggtcaggagattgagaccatcctggctaacatggtgaaaccccgtctccactaaaaatacaaaaaattagccaggcgttgtggcgggcgcctatagtcccagctgctcgggtggctgaggcaagagaatgtcatgaacccgggaggcggagcttgcagtgagtcgagatcacgccactgcactccagactgggtgacagagcgagactccgtctc

SEQ ID NO: 19012 - DNA, 2040 bp, Homo sapiens
ctcattttgctccaaattttaagttgcttcagaaatttaattagccctctgcttactctacaccatggaaaaaaggtaatatagtagaaattctgatagcaatttcaaaagatgtccaaaatagacattaatcattggaatgtctttcattgttaataagcacagtattaagtggtttaagttctagaatgattttaataaagtcatttatgatacttagctgtgcattccaaactgtaaaggaaaaggtaaaaaatgctacttaaaaataagctaaaaaccaagacagtcggtgaggtctgtggaaatggtagtattcatcttgggagaaacatgctactggaaaggcctggatttgtctagatgggagtcattaagactgtgggacctaaagtattcagcacaataaagcaacaggacatttcaatgttttccctggtagcctgagagagaagagggttggggttatgggacccaggggaagaccgaagacaaatctttaaagaaaaagataaatatgggtaagggtccctaaggcagtgacggcctaagcacactggtactatcttgactatcttgtggtcaaagttatttcctcttctgtgctataatcctctcctccactaatccactctgagtaaagatctgttacacaccatacccttgttcatggtgcccaggggaaatgaagaggagagtattacaggcaactggaagattaagcatcccagaccccattctgaggtatcagaaatattgaggaggatactggacttcctaagattatgtggaatgggggcctacaactttttgtgtataggaaaataatacctcagagggcagagggcaaagggaaatgaggacattcctaactggtctctctgttttaccttttatgctcctctaatccattttccatccagactgatgtccaaatttaaaggtctcatcgctcccctgcttaatatacttgaatgacttcttatgtaaactttgtcatgatctaaaagttcccgctagatctgcaattgccttcctccccccgtttcatctgtttagcagaccgagggcaccagtctctgtggtttaaacttgccaaacttttcttcacggaagttttgctgttcttttctccactagacagctgttccagaagttcttatgtctgattccttctcattcttcatgcctaagcttaaatataacacaagaagcccttccctgattattctaaacaggggccttgcctattgatagtttctattacagtattatttatagttccttaattgccccataatgatgcagttattttacttgtatttttattatctgtttgccccataaatattactctcataaagacagagactgccctgttctcctttggagctcagtaaaacaaatatttgttgaataaatgaatatttgaagttagtctttatggaagcattataactttggttgtaagttttataatttaatattgtttataactctgaagataagtgagtctaaaccaggaaaatttacatttatactttaatgaataaaaatcatgaatacttacaaaacattcactattgccaagcattatatatacctagtattttacaaagccttctcttgtcactttcatagctactctaagtgatgggtcctgtaaccctgatctattggaggttaaactgagattcagagttaacttgtccagggtcacacagtaaattaattgtatcttaaccattaaaaatgtcatatgaggccgggtgtagtggctcatgcctataatcccagcactctgggaggctgaggcaggtggatcactttagcccaggagttggagatgagcctgggcaatatggcaaaactctgtctctacaaaaaaattaactgggcatggtggcatgtgcctgtagtctcaggtactaggaaggctgagttgggaggattgcttgagcctgggaggttaagcctgcagtgaaccgtaagcgagccactgtactccagcctgggtgacagagtgagagaccctgtctc

SEQ ID NO: 19013 - DNA, 3493 bp, Homo sapiens
ggttaatgttgctatcttaagcactggcatttgggcaaaacgtgactgtgttctgtgggagaatccaaaggcattattcactctagttgagatagaattgggtggctaaacagggtgtgtggtacccaaaagattaaatgttacatgtccttttagtccttgaccaggtctagccttggcagaagcaagggagccactaagccaaactccctgtgcagacagaccatgtttcaaggctggaagtagtgccctggcaacacacaaaaggaacggtgaaatggtaggcaaagtgaacttggctctgctggcctctttggggtcacagaaattgctccttgtggtaatcttatatttctgtcaggcacagggccaagaagctgtgtaacagacattactttgcttgcatctctttttcataccttttccctctgaggcagcttttgcttagaaaacagtcccttcactctgcctttcctcctaacttcctgtgcctcttcatgttctgctcaagctttttaaagcaacgaagctgttggagaacttaaatccttgcaactgagagataagctacttaaaggcggtagagatcttttttttttttttttttgagatggggtcttgctgtgttgcccaggctggagtgcagtggtgtgatctcagctcactgcaacctctgctttctgggttcaagtgattctcctgcctcagcctcccaagtagctgggattacggctagctactcctggctaatttttgtatttttagtagagatggggtttcaccatgttggccaggctggtctcaaactcctgacctcaaacgatctgcctgccttggtctcccaaagtgctgggattataggtgtgagccactgcgcctggccatgtagatgacttttgaccaaaatgtttcaccttctcattcagatattcttagtaaccaaaacagtgactcatgcagttgagagagcctttgggctgtcagtttacagtacatcaggcttgctgaggctaagcaaatcagaaaggtgccatgtttataacagaggtcaaagctccttacttctgaaacattagctgtggttaaaaacaaaaactcttccttcttgtattgcttgtctatcaaagccaggaaagtgggggatcactgtagttaaattttttttttttttaattagagacagagtcttgccctgtcgcccaagctggagtgcactggcgcaatcgtggtacactgcagccttgaactcctggactcaagcagtcctcctgcctcagcttcccaagtagttgggagtaggtgcacaccaccatgcccagcgaattttttgtagagacagaggtcttgctatgttgcctaggctggtatcaaaattactggcctcaagcgattctcctgcctcggcctcccagatgttgggattactggtgtgagccaccacgcccagctcaaaaacaatttttttaggggcacttctacaaatcatgaaagggggataaaagcactgactttaaaaagccatgtttaagatgctataaatgttctccccttttcattgattggagagttgtagaggaccttagagatcattttgtctaactccctcatcccaaagataaactgaggcctagagatcgttcagggtgttgtaactgggaacatctgaatgctgaggcctagagatcgttcagggtgttgtaactgggaacatctgaatgctgaggcctagagatcgttcagggtgttgtaactgggaacatctgaatgctgaggcctagagatcgttcagggtgttgtaactgggaacatctgaatgctgaggcctagagatcgttcagggtgttgttgtaactgggaacatctgaatgctgaggcctagagatcgttcagggtgttgtaactgggaacatctgaatgctgaggcctagagatcgttcagggtgttgtaactgggaacatctgaatgctgaggcctagagatcgttcagggtgttgtaactgggaacatctgaatgctgaggcctagagatcgttcagggtgttgtaactgggaacatctgaatgctgaggcctagagatcgttcagggtgttgtaactgggaacatctgaatgctgaggcctagagatcgttcagggtgttgtaactgggaacatctgaatgctgaggcctagagatcgttcagggtgttgttgtaactgggaacatctgaatgctgaggcctagagatcgttcagggtgttgtaactgggaacatctgaatgctgaggcctagagatcgttcagggtgttgtaactgggaacatctgaatgctgaggcctagagatcgttcagggtgttgtaactgggaacatctgaatgctgaggcctagagatcgttcagggtgttgtaactgggaacatctgaatgctgaggcctagagatcgttcagggtgttgtaactgggaacatctgaatgctgaggcctagagatcgttcagggtgttgtaactgggaacatctgaatgctgaggcctagagatcgttcagggtgttgtaactgggaacatctgaatgctgaggcctagagatcgttcagggtgttgtaactgggaacatctgaatgctgaggcctagagatcgttcagggtgttgttgtaactgggaacatctgaatgctgaggcctagagatcgttcagggtgttgtaactgggaacatctgaatgctgaggcctagagatcgttcagggtgttgtaactgggaacatctgaatgctgaggcctagagatcgttcagggtgttgtaactgggaacatctgaatgctgaggcctagagatcgttcagggtgttgtaactgggaacatctgaatgctgaggcctagagatcgttcagggtgttgtaactgggaacatctgaatgctgaggcctagagatcgttcagggtgttgtaactgggaacatctgaatgctgaggcttagtccagtgttctctctcccttaccactcctcttccccttccctctataatggcagtacccagggcccggtccatagactactatcgagtgctcctatgtgcatcttagtacgtatcattttcccttgcctttttccttctatcctttcagtggtagcaactgcccttgctaatcaccgtaacctcggctgagaaagaagaggaagcgaaatccaagatgcagctcagttcatcaaagcctagcaggtcccctcagctgccttttcatgcctgccacagactacagtaggacaaaacctgacctggtctttgaagttaagagctaagaaagcttcctatagtagtatctcccatggcacttaccacattctatctggtattacaattatttgtatgcaattaatcactcttagattgtatgttcctggagggcagaatatgcccattcatatttgtatcttcttccttctgctcttggcacctaacacagtgccttgcacacaaacaataaatgattgttgagtgaataagt

SEQ ID NO: 19014 - DNA, 4312 bp, Homo sapiens
  CDS (2656)..(2967)
gacagagtaataagtagaagaaggaaatcagatttttctaaagcctactccttcctcactttgaaggccttctgggaaagacagcaaagttgagctcatataaaccaaaagctctggtcccagttctccctgtatggtggggagaattgcccattctttcttacttctgacaactggctcttcaagtacacttcaaatacctgagaacctattcatatccattctctgaatgggaagaaaattgctcctccttggcaaacatctttggcctgggcaaaactttccacttttttcatttttgtggtcactgttctcttctatatccttttatgtattagtccataagcactaagttttgaaagcactaagacattctagagtccttgattgttcacccatacttccatttctttattcaataaacatgtattaagttcctattatgtcagatgtgcaaattcttatggtaataaaaagatgtatgagacatagacactttatttagtcaaacactcaacaatatttgaacatctactgtgtacaaggtgctaaggatcaataaaggagtagtgcagtttaagacaacacaacaaaaacaaactcttcactccactggctgtaacacatttctactctgagatcttcatggcacaacttcttgaacaagtgttttcaatagtcactctcttcacatttttcttctattcctcaacatacagaagaaacgtgtgttggactttccagttgaactttcaacccaactatttgtggaaattgctattaccaaattacttatgatgttgccaaaacaaatgatcaattctcttcctgttacatttcatgcatcagaagcatccaacatagtggaccacattctttttgaaatactttcttcacttgacttttacaacgccatccgctcctaattttcctcctgccggccaccgactcctactcagtatctttagctggcccctcctcctctgttcaacctctaaatgtcgatatgtctattccaggattcagtctagaaacttttccttttatccttgaatattcttaccctagcttatttcatctagtcctgggcttttaaaaatcactttacgctactcatgtccaagttgacctctctaggactatagcacaaggggtataattattctaaagtaacccagaagtttaataagctggccaagaagagggattttctttttcccagcatgagggactctacctagtatatgtctctatagaatgggtggctttctctcctaagaaaaggaaaaccctttgcacgagccccaaaaactctaggttctgggcagttgattttcccagataatgttgtgaacagctggcacctaaatctagactgtttcacaccaaaagcctgtgtgttcctccattgataaagctgtgtcctcatgctaacatgataaaaaattatagtaagggaaactagtcttcctacactgaaacacagactcatattgtgagcccagtaatttcctgaccatttatgcatcagtgtaagataggaggatggggaaatcatgcaatctattcttttgctgattagtaatctttgtgagttttcctaatacagcattttttttttggctgaacgcagaagaatttattgatggtacacaacaaggtggggctccctaggcctctccctcttcagagggtctgcatggaaactgtgaggaggggagattctcattgtggtggggcactgagtgtggcagggactccccagaagctgagggcctctgttttcctctcatgctctcgctggggctggtggtccagggatcttactctttgaaggccctgtgggcaatgaggtcgatcacccttttgctatagccaaattcattgtcataccagaaagtgagcttgagaaagtggtcattgagggcaatgccagtcccaggatcgaaggtggaagagtgggtgtcgcagttaaagtcagaggagacaagctggttctcagtgcagcccaagatgccctcgaaggggaactccgatgctgcttcaacactttcttgatgtcatcatttttggcaggatttacataggcaagtcaggtccacaaataacatgttggcagtgaggacatgaaacgtcatgccagtaagcctcctgttcaactcagggatgacatttcccatagccttgacagtgccaggagatgcaggaatggcattatggagagccccgcgactctcatggcatagtttcctggaggggctatccacagtcttctgggtggcagcgatgtgtggactgtcgccataagtccttccatgacaccaaagttgtcatggatgaacttggccaggggtgctaagcagttagtggtacaggtgacattgctgatgatcttgaggttgttgtcatacttctcatggttcatgcgcgtctcagatatgggggcgtcagcagaggggcagagataatgacccttttggatccctcctgcaagcgagccccagccttctctatggtggtgaagatgtcggtggactctatgatgtactcaaggccagcatcaccctatttgattttggtgggatctagcttttggaaaatggtggttaaatttgtattcatgacaagcttcccgttttcagctttgacggtgtcatggaatttgccatggatggaatcatactggaacatgtagaccacgtagtcgaggtcaatgatggggtcattgatggcaacagtatccactttaacagagttaaaagcagccctggaggccaggcacccaatatagccaaacccattgactccaggcttcaccttcactgtggtgccttgggaatgccgctggcgctgcacaagaaaatgtggctgtctgtcgaacgggagaagcagaaatctacagcatattatttaacccataattatcatattgagaaattctttgcgaaatctggtaccaataggtggtgactcagatgggcatcacttgacatagcatgctgaccttccccgagcatcatgtggacaattcagtcgtctcagtattacttgtttaaaagactatccttttgctccaatgaattacttttgtgaaaatcaattgaccctatgattttggccgttaactaacacataagcaataatttcctcaaaatggattataggcctaaatttaaaggccaaattatacacctcttaggagaaaacatagattaacatactcatgaacttgagttcgacaaaatcccgatgtttcctggtagaagaaaaaagttgaaatattgagtcatgatcaaaactaaaactgtttgcattttaaaagacatcaataagataatggaaatataatccagagactgagaaaaaaatttcaagtcatacatttgataaaagatttgtatccaaaatataaaatacactgacaactaaatagcaaaaagataaataagccaattttaagttgggcaaaatatttgaataaccattgcaccaaaaggtgtaggaatagctaataaagcacatgaaaagatggtcagtatcatcagtcagcagggaaatgcaaatcaaaactacaatgacacaccacttcttacccactagaatgctatgataaaaatgaaggacaataacaattgaggaagtgaaataacaatgatgtggaaaaattgaaatactcatgcattgttgatgggacatgcagccatgttggaaagcagtttggcagtttcttaaaacgttgaagatacatttaccgtattacctagcactttcattccttgttgtctactccaaaggaaaaaaacctatgtccacacaacacatgaatgtgaatattagtagcagctttatccataatagtccataaagtagaaacacatcaaatatctatcagctgatgaaagaataaacaaatgggagtgatccatacaatttaatagaatctagcacctaaaaaaataaaatattgatacgtgctacaacacaggtgaaccacaaaagcacattaatctaagtgaaagaagacagatacaaaaaaccacatgttgtatgactctatttttatgatatccagaaaagacaaatctgtagtgtcagtaagtcaattaggggttgtctggagctggggagtgggaataaggggtggtattgatgagcatgagggatttcttaggaattatagaaatgttccaaaacaagattgtgatgatggtcaaacaagtctaaaattttactaaaaataattaaactgtacacttaaaataggtgaatgttatgatatgtcaattatacctcagtaaagctgtttaaaaac

SEQ ID NO: 19015 - protein, 104 aa, Homo sapiens [sequence omitted]

SEQ ID NO: 19016 - DNA, 5555 bp, Homo sapiens
  CDS (372)..(1565)
atgtttctaccaataaacagtaactaaaatataaactatgctccaatgaactaatttttttttactgctatttgtcttctcttttagaaaattattactatatgtttatttgaattctgtagttttttgttttctaatttgaatattaattctccttatcccaattgtgagattaccccagcacttaattattttgatttctctttctctatcctatgaattcttgttttatttttatcgttttaaacataatctattgagggaaagttaagtaattttctgtattccctaaacctagagatatcaaagcaggaaatatccttctgacagaaccaggccaggtgaaacttgctgactttggctctgcttccatggcatcacctgccaattcctttgtgggaacgccgtattggatggccccagaagtaattttagccatggatgaaggacaatatgatggcaaagtagatgtgtggtctcttggaataacatgtattgaactagcggaaaggaagcctcctttatttaatatgaatgcaatgagtgccttatatcacatagcccaaaatgaatcccctacactacagtctaatgaatggactgattattttcgcaactttgtagattcttgcctccagaaaatccctcaagatcgacctacatcagaggaacttttaaagcacatatttgttcttcgggagcgccctgaaaccgtgttaatagatctcattcagaggacaaaggatgcagtaagagagctggacaatctgcagtatcgaaagatgaagaaactccttttccaggaggcacataatggaccagcagtagaagcacaggaagaagaagaggaacaagatcatggtgttggccggacaggaacagttaatagtgttggaagtaatcaatccattcccagcatgtccatcagtgccagcagccaaagcagtagtgttaacagtcttccagatgtctcagatgacaagagtgagctagacatgatggagggagaccacacagtgatgtctaacagttctgttatccatttaaaaccagaggaagaaaattacagagaagagggagatcctagaacaagagcatcagatccacaatctccaccccaagtatctcgtcacaaatcacactatcgtaatcgagaacactttgctactatacggacagcatcactggttacgaggcaaatgcaagaacatgagcaggactctgagcttagagaacaaatgtctggctataagcgaatgaggcgacaacatcaaaagcaactgatgactctggaaaacaagctaaaggctgagatggatgaacatcgcctcagattagacaaagatcttgaaactcagcgtaacaattttgctgcagaaatggagaaacttatcaagaaacaccaggctgccatggagaaagaggctaaagtgatgtccaatgaagagaaaaaatttcagcaacatattcaggcccaacagaagaaagaactgaatagttttctcgagtcccagaaaagagagtataaacttcgaaaagagcagcttaaagaggtacttatgtcataaaactttccaagcaaattttctgcttattaattatatccaatggtgaccaactcatagaagcattaggataaaattatcttttgttgtttatggtcactaaatgggtattagtttaaatgatgacattgattataatcagttacccttaactgagtcatttagttgagtaggatttaaaatgaatcatttcctgaaaatatactttttttatgtttttattttatatttatttatttatttttgagacaaagagtctcgctctgtcacccaggctcgagtgcagtggcgcgctctcggctcacttcaagctctgcctactgggttcacaccattctcctgcctcagcctccctagtagctgggactacaggcgcccaccaccacacccggcaaacatttggtattttttttagtagagacggggtttcaccatgttagccaggatggtctcgatctcctgaccttgtgatccgcctgcctcggcctcccaaagtgctaggattacaggcatgagccatcgtgcctggccttatgtttttatcttttgtgtgtattttttgagacagtcttattctgttccacgggctggagtgcagtggcacaatcatagctcactgcagcttcgacctcccgtgctcaagcaatcctgctttagccttccaagtagctgggaacacaagcacacaccaccactcctggctgatttttaaatttattttttgtagagacagggtcttgccatgttgcctagtctggtctcaaactcctgggctcaagcagtccgcctacctcggcttcccaaagtgctgggattataggcataagccaccgcacctgatcacatttattactttaaaagtaaacaataatgtcttacttttggatcagaagattataataatttgtttttatgccaatttaaatgtagaataagggagatatttgcttatcaggttttttttaagtagaatatgctgattgtttctttgtggctacagggtttcatatttgtttgccctttcttgtgctgcccggcctcccccctaccccccgctttttttttgagacggaagtctcactctgtcatacaggctggagtgcagtggtgtgatcttggctcactgcagcctcccctccccccaggttgaaaggattctcctgcctcaacccccccgagtagctgggattacaggtgtgtgccaccatgcctggctaatttgtatatatttttttagtagagatggggtttcaccatgttagccaggctggtttcaaactcctgacctcagacaatctacccacctcggccccccaaagtgctgggattacaagagttagccaccactcccggctcttgtgctgctttttgtttgtttggtttggtttggtttgagatggagtctcactctgttgcccaggctggggtgcagtggcatgatctcggctcactgcaacctttgccgcctgggttcaagtgattctcctgcctcagcctcttgagtagccggcattacaggcgactgccaccacgcctggctgatttttgtatttttagtagagatgagggtttcaccatcttggccaggctggtcttgagctcctgaccttgtgatccacccgcctcagcctcccaaagtgctgggactacaggtgtgagccacaacatccagctgacaacttttttttttttttggagacagagtcttgctctgtcacccaggctggagtgcagtggcgcgatctcggctcactgcaagctctgcctcccaggttcacaccattctcctgcctccggctcccgagtagctgggactacagggacccaccaccacgcccggctaattttttgtatttttggtagagactggatttcaccatgttagccaggatggtctcaatctcctgacctcatgatctgctcgccttggcctcccaaagtgctgggattacaggcgtgagccaccatgcctggcccgacaacttcttaaagagtatcattattcaagatagtcactaggacagaaaaatgatatgtcttttaatttacccacccccccccccgtcttataggatgattgaaatttttagttcatataattaattagcatactgtgatacatcgattgattttgataaaataagtataatcaatttgatattaatgatttttgtatgtgtaggaatttgccttataatcagatatgtatgtcttgttgtgtacctattggtggcacaaagacttgctctataccttgccacgtgagcttcactgacaagatttttacaactctaaatggtataatttgcagtatactcccatgactataattcgaaagccaaactctactggaagtttgagtttgaaacaatagtaaatagagtttccaactataataaatctccaacaaaatgcagttgttttgttttccagtgaaatcagactttagctttatggattagtttgtttagataatcctttaggcatataccatatagtcaaacaaataaatgcattttcttttagaagctaagttgttgtgtatgtatttgtgttcatttagaataatgattctcagtagagaggaagggacatatcagagtctcggaggggagagttccctggcagaagattttgaaaaggatacccaggtatggccaggcgcggtggctcacccctgtaatcccagcactttgggaggccgaggcgggcaaatcacaaggtcaggagtttgagactagcctgcccaatatggtgaaacactgtctctactaaaaatacaaaaaaattagccgggcggggtggcacatacttataatcccagctactcaggaggctgaggcaggagaattgcttgaacccgggaggcagaggttgcagtgagccgagatcgtgccactgcactccagcctgggtgacagagtgagactccatctcaaaaaataaattaaaaaaaataaaaaataaaaaaattagccaagcatggtggctcacaactgtcatcccagctacacaagagggtgaggcaggagaatccctgtaacttggaaggtggaggttgcagtgagctgggccactgcactgcagcctgagcgacagagctagactctgcctcgaaaaagaaaaagataaccaggtatatagtctacttgtgtgcccatgttattcctttctcttcccatagcgtgcatacacataaactcttaagtaataatttatgtgctttttatttttatgtgtttgaatattttattaactaaagggaaagaccatgaatgaggtctagtagtctctgagaaatgatcctatactaagaaaaatgagctatttatattctaaacaatgttgatggtgttttgttttgctttttttgagacagggtttcgctctgtcacccatgctggagtgcagtggcacaatactgctcactgcagcctttacctcccgggctgaagcagttttcctgcctcaccctcccaagtagttgggaccacagacgcataccaccatgcccagctaattttataatttattttttgtagaaacagtgttgccatattctccaaactggtctcaaactcctgggctcaagcaatcctccggccttggcgtcccaaaatgctgggattacagatggatgtgagccaccattcctggccacagaatgctaatactagtatattttttaccaaaagagtatcaaggccagagtggtgggtggcacatgcttataacagcactttgggaggctgaggtgggaggatcgcttgagcccaggagttcaagaccagcctgggcaacatgttgagaccctgtgtctagcaaaaaaaaaaaaaaaatcattagccaggcatggtgggacacacctgtggtcctagctactcagtagtcttaggtgggaagatcacttgaacctgggaggtccatgctgcagggagctgaattcgtgccagtgcattccagcctgggtcacagagtgaaattcgatct

SEQ ID NO: 19017 - protein, 398 aa, Homo sapiens [sequence omitted]

SEQ ID NO: 19018 - DNA, 4693 bp, Homo sapiens
  CDS (23)..(1459)
ccattcaagcattcaaagacacatgataatgcacaatggagatggaacttataaatgtaagttttgtgggaaagcctgcccttgtctcagcatatatcttatacatgaacgagttcacactggagagaaaccatataaatgtaaacaatgtggtaaagcctttagttattcaacttcccttcaaatacatgaaagaactcacactggagagaagccttatgaatgtaaggaatgtgggaaagcattcggtagtcccaattccctttatgaacatagaagaactcacactggagagaagccatatgaatgcaaacaatgtggaaaagccttcagatggttccattcctttcaaatacatgaaagaactcacagtgaggagaaggcttatgaatgtaccaaatgtgggaaagcattcaagtgtcccagttatctttgtagacatgaagtgacccactctgggaaaaagccctgtgaatgtaaacaatgtgggaaagcattatcttatcttaactttcaaagacacatgaaaatgcacactagaatgagaccttataaatgtaagactgtggaaaagcctttgattctcccagttcgttttgaagccatgaaagaactcacactggagagaaaccttatgaatgcaagcactgtggtaaagccttcaatcgttccagttcctttcactatcatgaaaggactcacactggagagaaaccctatgaatgtaagcagtgtagtaaagccttcatttcttccacttcctttcgatatcatgaaaggactcacactggagagaaaccgtatgagtgtaagcaatgtgggaaagccttcagatctgcctcacaccttcaaatgcatggaaggactcacactcaagagaaaccctatgaatgtaagcagtgtggtaaagccttcattttttccacttcctttcgatatcatgaaaggactcacactggagagaaaccctatgagtgtaagcaatgtgggaaagccttcacatctgcctcacaccttcaaatgcatgaaaggactcacactggaaagcaactgtatgaatctaaacaatgtgaaaaaacctttggatctgtcagaaaccttcaaattcatgaaaagacacaccctggagagaaaccctataaggaatatggaaaagcattcaacaatttctcttcctttcaaatacatgcaacaatgcacagaggacagaatgcctatgaatgtaaagagtgtgacaaagcattcatatctgccaagatccttcgagtacatgcaagaacacaccctggagagaaaccctatgaatgtaaggaatgcggaaaagcgttcaattatttttcttctttacgtatacacaaaaggatgcacactggagagaaaccatattaatgtaaggattgtgggaaagcattcagtttgcctggttcctttcgtagacataaaagggctcacactggagtgaaaccgtatgaatgcaaggaatgtggcaaagccttcacttcttctggttcctttcagtgtcataaaaggattcacactggagagaaaccctatgagtgtaagcagtgtggtaaagccttcatttcttccactgccattcgtagacatgaaaggactcacactggagagaaaccctatgagtgtaagcaatgtggaaaagcctttatttctttcagttccattcagtaccatgaaaggactcacactggagagaaacagtatgagtgtaagcagtgtggtaaagccttcatgtcttctactgcatttcagtatcatgaaaagacccacaccagagagaaacactatgaatgtaagcagtgtgggaaagccttcatttcttccggtagccttcgatatcatgaaaggactcacactggagagaaaccctatgaatgtaagcagtgtggtaaagccttcagatctgccactcaacttcagatgcatagaaagattcacactggcgagaaaccctatgaatgtaagcaatgtgggaaagcctacagatctgtctcacaacttctggtgcatgaaaggactcacactgtagagcaaccctatgaatataagcaatatgggaaagccttcagatttgctaagaaccttcaaatacagacaatgaatgtaaacaattaaatgtttatagcagctgcatactaacatgttattctgtattttttttttctttttgagacagagtctcgctctgtccccaggctggagtgcagtggcgtgatctcggctcactgcaagctccacctcctgggttcacgccattctcctgcctcagtctcctgagtagctgggactacaggtgcctgccaccacacccggctgattttttgtattttttagtagagacggagtttcatcgtgttagccaggatggtctcgatctcctgacctcgtgatctgcccgcctcagtctcccaaggtgctgggattgcaggtatgagccaccgtgcccggccgttattctctattttttgttgttgtttgagatgagtcttgttctgttgcccaggctggagtgcagtggcatgatctcgcctccgggttcgggcaattctcctgcctcaggctcctgaggaaaaagattcctaggattacaggtgtgcaccaccacacttggctgatttttgtatttttggtagagatgaggtctcaccctattggccacactggtcttgagctcctgacctgaagtgatccacctgccttagcctcccaaagtgctgggatgacaggcatgagccactgcacccagctgttattctctatttaattaattgagaagccataataaaatatctcagtgccatcatgcattagatcaagtttatgttaccacattattttttggacattgtgagtcaatattaccaagtggacaaaatcccaggcatttttttcctcatgtaaattttaattttcatgcttatatacttagaacatttatcttggtcctaattttttgttcattcataataccaaaagttatctcatgttcttcagagtgactttgtgccatatcccacagtggcatacctgtcttcaaagagggtataattcacaaaaggacttacactagaggaaaacccaatgaatgtaagctgcgtgggaaagcattttctgatctgagtggcattgaaacccacatggtattgcacatgacagataggcctctctccccgttcatttctttttttttgagacggagtcttgctctgtcgccgaggctgagaacagtggttccatctctgttcactgccacctccacctcctgggttcaagtgattctcctgccccagcctcccaagtagctgggattacaggtgaccgccaccacgcccagctaatttttgtatttttagtagagacggggcttcactatgttggccaggttcgtctcgaactcctgacctcaggtgatccacctgcctcagcctcccaaagtgctgtgcatacaggcatgagccactgcacccggccttctccccattcattttcaaagacataaaaggatgcacaataaagagagaccctctgaatgcaagcaatatggaaaagcattccattgtatcagatccttttgtagccatgaaagaactcgctgaagagaaaccctgtaaatgaagggaatgtgaaaagccttcattcctgaaatgaagcaattcatactattaatatatgagagaaatcctattataagaaattgattgctgtgcacggtagcttacctgtaattccagcacttccagaggctgaggcgggtggatcacttgaggtcaggagttcaataccagcctgggcaacatagtgaaaccctgtctctaccaaaaatacagaaattggccaggcatggtggcacgtgcctgtagtcccagctactcaggaggctgaggcaggagaatcacttgaacccaggagctggatgttgcagtgacccgagattacgccactgtaccccagcagagtgagactccatctgaaaaaaaaagcaaggggccggcacggtggttcacgcctgtgatcccagcactttgggagaccaaggcgggcagatcacctggggtcaggagttcgagaccagcctggctaacatggcaaaaccccgtcgctactaaaaatacagaaaattagatgggcatggtggcacatgcctgtagtcccagctacatgggagactgaggcaggagaattgcttgaacctgggaggcggaggttgcagtgagccgagatcacagcattgcacttcagcctgggcaacaagagtgaggctccatctcaaaaaaaaaaaaaaaaaaaaaaaaaaattgaggaagcattcagttgtcccacttcctttcaaacaggaagagacactagagagaaaccctctgagataactgactgttgaattaagaagagaggcctggccggacacagtggctcacgcctgtaatcccagcactttgggaggctgaggtgggcggatcacgaggtcaggagatcaagaccatcctggctgacacggtgaaaccccgtctctactaaaaaatacaaaaaaactagctgggcgtggtggtgggcgcctgtagtcccagctactcgggaggctgaggcaggagaatggcgtgaatccaggaggcagagcttgcagtgaatcgagatcgcgccactgcactccagcggcgacagagcaagactccgtctc

SEQ ID NO: 19019 - protein, 479 aa, Homo sapiens
MIMHNGDGTYKCKFCGKACPCLSIYLIHERVHTGEKPYKCKQCGKAFSYSTSLQIHERTHTGEKPYECKECGKAFGSPNSLYEHRRTHTGEKPYECKQCGKAFRWFHSFQIHERTHSEEKAYECTKCGKAFKCPSYLCRHEVTHSGKKPCECKQCGKALSYLNFQRHMKMHTRMRPYKCKTVEKPLILPVRFEAMKELTLERNLMNASTVVKPSIVPVPFTIMKGLTLERNPMNVSSVVKPSFLPLPFDIMKGLTLERNRMSVSNVGKPSDLPHTFKCMEGLTLKRNPMNVSSVVKPSFFPLPFDIMKGLTLERNPMSVSNVGKPSHLPHTFKCMKGLTLESNCMNLNNVKKPLDLSETFKFMKRHTLERNPIRNMEKHSTISLPFKYMQQCTEDRMPMNVKSVTKHSYLPRSFEYMQEHTLERNPMNVRNAEKRSIIFLLYVYTKGCTLERNHINVRIVGKHSVCLVPFVDIKGLTLE

SEQ ID NO: 19020 - DNA, 2872 bp, Homo sapiens
  CDS (1013)..(1492)
cttagatggcacaatccaggctgttgcaccccttcttttcatcagtgagatgtaaagtctttatcagggacttcaaatttgcatttgtcctagaactcactgctaggtaaatctgctaactatgcgagacagagagctacttattctctgctttgagattcccggaaacagcatctacagccttggacaaggccatagtctgttttacccctattagcttaacaggtcctaccttctgccttgctttggtttctcctactgtattttttttttttttttttttgagatggagtctcgctctgtctcccaggctggagtgcggtggcacaatctcggctcactgcaacctccgcctcccgggttaaagcgattctcttacctcagcttcctgagtagctgggattacaggagcatgccacaagacccagctaatttttgtgtttttagtagagacagagttttgccatgttggtcaggagttcaaaaccagcctgaccaacatggtgaaaccccgtctctactaaagatataaaaattagtcgtgtgtggtggcgcgtgcctgtaatcctagctactcaggaggctgaggcaagagaatcactggaacccggaaggtggaggttgcagcgagccgagattacaccattgcattccagcctaggcaacagagtgagactccatctcaaaaaaaaaaaaaaaaaaaagaagaagaagaaagaaatgatgcatgcaaagttcttagcacaatgcttgccaccattatgattattttcctattcttgggggtaaacagtgggtcttttctttgatgtggtctttgcaggaggccaagctcgttgttttgatctatgtaggggccgtttggttctgccctgttcccccatccatcctacaagcctaaccttggcctactggcaagacagatggtccttgtctcactggccttgcagtggggtgaaggtcattgttctgacccactaccctggcgatttgtcttggcccacattgctagatggggaagggctgtgggttggctcagccttacgcactgtctcctggcagtggcatgctgactagcattaggggtgaggccaacctctgcctcagtatgctggagccagctagagaagatgctttcccggagggtgtcagagccctgtttggtgttgaaacaacacagaaactgctgtgctcaccccttccccatctagcagtcagccacccagcccagcttctggtccttctactcactgtgactcctcacacattacacccacatgagcatgcatgcatacacacacgcgtgcacacacacgtgcgcacacacacatgcacacactcgcacacacgtgcgtgcacacacacgcgcgcacacacacaggcctgccctcatcttccccatccctgttactacccttcctcctcctggttaaataagcagcaaagggaaaagtgggcactgacaaaatgtgtaagctggcaggacctaatctaatatacaggtggataacaaaacctcatagccaatgaacaggacaggaatctgataactcacaagagtgtgctatagttttctgctgaaatttctaaaaaatttctcttcacagccactcctcttttggatcaaagataatcaaagtaagatgattcttctttacaaaataaggcgggtctcattacctttggcctgattacttacataagtgcagcaagaatggtaatcgatcacataggcctttttaaatttgctttgctgaaacttttcgtaaggaatctcagattgtacctttgaaagctacgaagccaaggcaagaattcgtcaccagattttgcctatagcacctacagattttgggtagatcttctcttcctgaagttcccaaaatatcctaagcctcctggacctggcaggaagtgaccttctttactcatctgtaatgctgaggacactgtaagccaggtaccaggctggctttccctagaagatattgtagactgggtccatcaagtctacttcagttccttaagactgtctggtcatatctgatgcatcattttcaaatatgacattccagtcaaagccttggttgtataaccagtatttcccatcatgtcctgttataaggaggacagattcttattgaacttgtgtgaataaatatattccatgaagatgagaacattcaataagaatttctggccaggcgtggtggctcacgcctgtaatcccaacactttgggaggctgaggcaggcagatcatctgaggtcaggcgttcgagaccagactggctagcatagtaaaaccccatctctactgaaaaatgcaaaaaaaaaaaaaaaaaaattagccgtggtggcaggtgcctgtaatcccagctacttgggaggctgaggcaggagaatcacttgaactcgggaggtggaggttgtgatgtgctgagatcgtgccattgtactccagcccaggcgacagaacaaaactccgtcccccaactcccacacccctcaaaaaaagaatttttgaattctggaggggttaggcagagagaaaaagataaatgcttcatttctgttttaaaaaagcataatcagccaggcacggcggctcacgcctgtaactccagcactttgggaggccgaggtgggtggatcacctgaggtcaggagtttgagaccagcctggccaacatggtgaaaccccatctctactaataatacaacaattagccaggcgtggtggcacgtctgtaatcccagctactccagaggctgaggcaggagaatggcttgaacccgggaggcagaggttgcagtgagccgagatcgcaccactgcactccagcctgggcgacagagtgagactccttctc

SEQ ID NO: 19021 - protein, 160 aa, Homo sapiens [sequence omitted]

SEQ ID NO: 19022 - DNA, 4653 bp, Homo sapiens
  CDS (613)..(2319)
actttggctttgacaccgactgcgagcgggagccgtgcggctggtgctgggtctggactggctctggcggatccccgcccgagttgggcgcaggactttttgccggggtaaacgcaactgcggcggcgccgccgcaagccccggtgcagcctcggcggcgggtttcgccgccgctgccgccgcctccgagcagccctgcggcttctattcactctgggagagcgatgctaagtttctcccatagaaagagccgggacacgcagaccgaagcggcgtagtcggcttccagggcctgaccagtgacccacacccgcgcggacgcctaggctggaggcagggggcccgtgctgtcccgggctgggctcaggcttccgagccgcaggtggaagaggaaccggcgccccgcagagcggccgagaggcggccaagtgaaaggtaattttggacacgccaggcatggaagattcggtgtttgtctatagtaacctcttcagtccctgaatcctgcaccttccgtttttctgtgcttgtacggcctactgggcttcctccctagccagagagctcttctgcagtggtgcggccttcccgggagcctgatcctggcggaccatggggagcaccctgggctgccaccgctccatccccagggacccctcggacctgtcccatagccgcaagttcagcgcagcctgtaacttcagcaacattctagtgaatcaggagcggctcaacatcaacactgccacggaggaggagctgatgaccctgcctggggtgacgcgtgccgtggcacgcagcatcgtggagtaccgagagtatatcggtggcttcaagaaggtggaggacctggcattggtcagtggtgtaggcgccaccaagctggagcaggtcaagtttgagatctgtgtgagcagcaagggcagctcagcgcagcactctcccagttccctgcggcgggacctgctagcggagcagcagcctcaccacctggccacagctgtgcccctcaccccacgtgttaacatcaacacagccaccccggcccagctcatgagcgtgcgaggcctctcggagaaaatggccctcagcatcgtggacttccgccgtgagcatgggccctttcgcagcgttgaggacctagtgaggatggatggtatcaatgccgccttcctggacaggatccggcaccaggtgtttgctgagaggtccaggcccccatccacccacacgaacgggggactgaccttcaccgccaagcctcacccgagccccacttccctgagcctgcagagtgaggacctggacctgccgccaggggggcccacccagattatctccactcggccgtccgtggaggcctttggaggcacaagggatgggaggcctgtgctgaggctggccacctggaacttgcagggctgttccgtggagaaggccaacaaccccggggtgcgagaggtggtgtgcatgacactcctggaaaacagcatcaagcttctagctgtgcaagaactgcttgacagagaggccttggaaaagttctgcacggagctaaaccagccgaccctgcccaacatccgcaagtggaaggggccccggggatgctggaaggctgttgttgctgagaagccctcgaatcagctccagaagggagctgggtatgcaggattcctatgggacgcggctgccggcatggagctgagagacgcgggttcacaggagagctcgccaagcaacgggcacgggaagctggcgggccccagcccatacctcgggaggttcaaggtgggaagtcacgacctgacccttgttaaccttcacctggcagccctgaccctcctggggagcgagaatcccagcaagaatcacagtgatggccaccggttggcgagctttgcacagaccctacaggaaaccctgaaaggagaaaaggatgtcattatcttaggggattttggccaagggccagacagcaatgactatgatatcctgaggaaagaaaagttccaccacctgatccccgcgcacaccttcaccaacatcagcaccaagaaccctcaaggctcgaagtctctggacaacatctggatcagtaaaagcttaaagaaggttttcacaggtcactgggctgtggtgagagaaggcctcacgaacccttggattccggataactggtcttggggcggggtggcttctgaacactgcccagtgctagccgagttctacactgaaaaggactggagcaagaaggacgcccctcggaacggcagcggggtggccttggagcgaagtgaagccaacatcaagcacgagcgatgatgacaccaaatccatgtgtccaccctgggacccaggagggcacagccaaggaatgagccctgtggggtgacgcttcagggcagagctgccttttaatttttattctcagagcatcagcacttgaggccttgccccacgccttctctgtggaccattcaggacctccagtgggggtggcgtgccaggcgcgtaccccaccaggtgggcaaagcagaaacctgcggggagcggagacgccttttatctctggatgccacagacctgagcagcattgggctggctgtccgctgctgactggatggcagcacaaagacaatatgagcagagggaggagaagaaggggtgctcaggctgcgggccacagtccagcagcgccagaagcactcatttctgaccaccaggctatgacgttcctgctgcgcattacagaaagcttttaactgtgatcaggcagtctgctcagatacattgagtggcgatttttagttttgttttgaaaaaataaacagattaacctgcctcgctgcagtgagagcatgggacaagtccgccacagccctcccccgcccccttcccccgccccccaacgcgcagtgtgtatttgcaccacggcaggtgcctctgtgtggagctagggtcaagccctgagcagcttcacttcccctgcgccttttatgtccccaccttgaggccttgcagaggcgcctctcaaggccccatcagctcgccgggacctctgtgaagcctctctgtcatctccccttcccagcccctccttcatcccctgcctccttcaccagcctggcttttgcctggagcactatttgtttagttctctttgcaggacaagaattctctcagggtggtatcacctcctccctcctccccactcactccagtttttagcccggagcctcctgtggttgactatcaggaatgtgtgctgtgtcaggatacataggaagttgacctcggggtatcatggagagtgtccctcctagtggctggaggtagggacagttggttgtggggctggagagaggttgtggggaggaagcgaggatgcgtgcctgccactaggcatctgcatccccgagcccaagccaggagggatttcccttaggcaacaccatcccagggagatctgccacaatttgcgtttcacagctaaagacgccgaggcttagagagctcgacctcctcaaggtcacaccactgggtaaatagagggatgcagactcaggttttgctatgtgctcacatttcaactttatgcttaacatgaatggaaaaatatgaaagtaaatagtgaaaaggtgagttatgagcttagattacctagattattccagtatcccatggaagctgaggacttattccgctttccacaccgaacactaaatgtggaccagtatcaagaaccctcctgtccccacgcagtgtaaacccagtggcttctctgacctggagctgatgggccgtgaagggggcccatttttctccaaaggccatccttttggggccacctggctccaaggagcatcgctggtcttggggacgggaagggaaccctcttccaggagctctaagggtacttgggaatcaattgtgtccattctgaggtctctccagtgggagggcggcagctcctgtccctgggttcaggctgtgcttctggaagcatcgaaatgggatgtctgagccttgaggaaaagcagcagggttagcattaaagtcaagaggggcagctcaggatgctaccagggagcacatcgtttctggtgcctcatctaaaggtaaaacctcccctacattcaccagccggatgtcccaaatccctttagccagattgctttttgcaaccaaagctgtggacagaaaagcctccttaagtgagctgaggggacaggaaatccaatcagatgacctttgtgttcgtaatcgggcttgagccagaggctggggagctgagtcccagccaaacctcactggcccgtttgcttttcacgcccagggctcagtggcccaggaagtgtgctgggcagcctgttcttactccagctcaacccattgggtgttggctgtttttggttttagttgttgttttgtattttgttgttttaattaataggctttatttgtaagagcagttttatgtttacagaaaaattaggcacaaagggattcccatatccctcctcttctttgcatatttccccctctaattagcatgttgcattagcatggcactttgttacaactgatgaacttgtattcattattagctacagtgttcatagtttatattaaagttcactctttgtgttgtgc

SEQ ID NO: 19023 - protein, 569 aa, Homo sapiens
MGSTLGCHRSIPRDPSDLSHSRKFSAACNFSNILVNQERLNINTATEEELMTLPGVTRAVARSIVEYREYIGGFKKVEDLALVSGVGATKLEQVKFEICVSSKGSSAQHSPSSLRRDLLAEQQPHHLATAVPLTPRVNINTATPAQLMSVRGLSEKMALSIVDFRREHGPFRSVEDLVRMDGINAAFLDRIRHQVFAERSRPPSTHTNGGLTFTAKPHPSPTSLSLQSEDLDLPPGGPTQIISTRPSVEAFGGTRDGRPVLRLATWNLQGCSVEKANNPGVREVVCMTLLENSIKLLAVQELLDREALEKFCTELNQPTLPNIRKWKGPRGCWKAVVAEKPSNQLQKGAGYAGFLWDAAAGMELRDAGSQESSPSNGHGKLAGPSPYLGRFKVGSHDLTLVNLHLAALTLLGSENPSKNHSDGHRLASFAQTLQETLKGEKDVIILGDFGQGPDSNDYDILRKEKFHHLIPAHTFTNISTKNPQGSKSLDNIWISKSLKKVFTGHWAVVREGLTNPWIPDNWSWGGVASEHCPVLAEFYTEKDWSKKDAPRNGSGVALERSEANIKHER

SEQ ID NO: 19024 - DNA, 1772 bp, Homo sapiens
gaaacagaacaacaaggtgacagccttttgctcaagtcaaaaagaaaataagtccctcatcttagtttaaagttgttcattcagtagtacagacttgcatttgaagacttattcttgatcttctgtagctttgacagcaaggacatcactacaatgggtacagaaataacacattctgatccttgctgagatccttgtatgggcctatcttaaatctagcctattgtctgtcttaccctttgatttttataagtagaaaacaggaaaaggctaaccaagcaagaggaaggcatagattcatcttcctttcaatcttgactatagtttaaagagaataccatgatctttctgttctattcttggcttacttgaatatttagccaggtctctgcatcttattcagtcagaaaacagacacagattcagataactcaaaggatgttacttgcttgagtaatccttgggcctcgctttaactttgtagatccaggaacagaattaagcagacagttcggtctacactgccaaatttcttagggaaaaagagggcaagtcagaaggaggaagttggcatttggctcaaatgaccaaattatttaaggtctctacacttcactttgcaccaagtagacccaagaatgattataattcagctacgtgtggtggtgcagatcagtagtcctagctattcaggaggctgaggcgggtggattggttgagcccaggagtttgaggctgcaatgagctatgatctcgccactgcgctttagcctgggcaacagaacaagaccctgtctcaaattaaaaaaaaaaaaaaagaagactctaattctatgagtggcagggtcctagaattatcaaaaatgggttatcaaacccatatgcataccaagcattgtctatagaataaagaatgttttgtccacatgtgtacttgtattcttaaaatgtttgtagcttctgctataatgattaaaaatacaaatctgattgttttcatcatgatgcagttcccaaacacttcaaaactactattgtgtggaggccagccaacattttttactttaaaagcaattctcagatttcaaaatgctgggaactaccagtgaagacttcactctaaggagttcatccctgagaatgaagactgaggctagaggttgcttggttactaaaagagtcaaaaacaagggagacagtagaatcaaaagccaagacacaaatttagcctaccaaaacctagggactcttgtttcttttagttttatttcaggcgtgctaaaacaagaagcatgctgcacctttctaatctgatctatcactaagttgcatggcaggtatttgtaaacttataattctgcaaaaggccataagctttctgagagttgaattcaatttttttttcaaagatttaagttaagtacccagcctgtccgaaacataagaatataaggtttcaattgcattatgaaaaactctacggtctgaacttcgtggccaggcacagtggctcacgcctgtaatcccagcactttgggaggccgaggtgggcagatcacttgaggtcaagagtttgagaccagcctggccaacatggtggaaccccatctctactaaaaatacaaaaattagccgggtgtggtggcaggtgccggtaatcccagctactcaggaggctgaggcaggagaatgcttgaaactgagaggtggaggttgcaatgagccaagatcatgccactgcgctctagcctgggcaacagagacactgtttc

SEQ ID NO: 19025 - DNA, 2241 bp, Homo sapiens
atgctcatactgggttttggggtgcccatgatatgtgtatatgtatatttcttttcttcatttttcaaagattatttcactttgccatagaaagaaatacaaagaacacaattgttggaaagtaataacaaagactggcaaagcgcattgtgatttttaaagcaactttgacatgaatttatgtgtttaatctttccaggagccatatggcacaaagggtattatttctcttgttttgcagttgaacaagggaaggtcagctcatttccccaacatcacacagctaatgagtaactgagccagaacttgaattcaggacctctcacatccagactctaccacatcaaattccctttccccagtggctctaactttgactctgttacatcctagaacatcacctctttacccgatatgaaagacaaccttttcacatagtttaggagttgactttctctgttcttaaagctgatctaacttgactagctgccttgtattacatattttctcccaaacacccctttctctaggacgaatccaaaatttggcaatcttgggagttagctatgtcatagtcagatctcttggaagacaaagagctccaggtctagagaagcaagtgggagcgtgttttccaagtgtacttagaaaatgtttatgagctttgtcctcatctgaataatcagaagatatgatttgatttttacaccttggtatacacttggagattacacagtcctgaggtttatatattcctcagagccattagactgaccaaaagggttcgtccctatgtttcatagtatttttacagttctcacagcaatcacttatcagtatttaaattgaccttagctgggcacagtcactcacttctgtaatcccagtactttgggaagctgaggccagaagtttaagtccagcctggacaacatagcaagactgtttctacaaaaaaaaaataaaaaattagccaggtgtggtggcacacacctgtaattctagctacttgggaggctgaggagggagaattgcttgaggctaggaattcaaggttacagtggactatgattataacactccacttcagcttgggtgacagagcaagaccctgtctcttaaaaaagtaaaataaaataaattaatctttacaacaaccctccaaggtagaccagaaagaggtggtatccttattttattgatggtctgtgtgaggtcatacagacagtaggtggccaagcccagatgccaagcctaagcctcgttccttttgtttacccaaggttcctattcataccattatatgaccatttagccttaaataatctgttttaattgcaaattttattttaagaaaggaaaaaaatcacatttattctgctgcatcttcttgctttattcataatgagttctgcaggtcaatttatcctcaacgatggcaagccagaatttaagtaaagcttctacttagctggtacatttgcatgtcaaatctttaattcagctgtcagtgttttagcatttactgtactttcattaataaatgttattttgatggtctcaggctaatcaagactatttgaaatgggggacggcaccaaatgaaatttacagagaaatcagagcttcttcatggactttaaaataattgttactttacacgtgtttgaaatcagaatacttgtaaaattaaagttagacatgttgttcttgcataaacaagcaaaagaagctaaggaatcaacttagatttatttgttcctttaagagcatgtactgagcacctgctgtgtgctagacatgttgtagatagaggaaatgcggatatcaacatggcaggcaaaaataacctgccctcaagaatttccattctagagcgagtagacagatgatatctcagatagtgccagggcctatggaaaaagctgaccaggcagggcactgaattctggggagtgggtggtcagggaaggccttgcttccttctcatccacattctggcatagaagtttgatttccatgtacatgtttttttttgtaacatatagctccagaatacgttatttttaactttgcactcaataaaaaatcaacttgtagtaattaaacttgttcagtacattcttcacagggacattaggtgctactacttctatcagcaacaagtatatgcttatctattttttatacattggagtctacacaaggcttcctgctttttataaaaggaactgcctctac
